United States Patent Application Publication US 2026/0191916 A1 - sequence listing, part 37

SEQ ID NO: 151 - DNA, 3084713 bp, Enterococcus avium (residues 1,542,358-3,084,713 of 3,084,713)
  source 1..3084713: mol_type = genomic DNA
tagcggttcattggatgaattaaagcatcaatatgctaaaaatcagatagaaattgaattttcacatgaggctgatctaggggtatttacaaccaaattgacagaattaagaaacgaagatattctgaatgactttacctttgatccatcaaagaacttacttattttgtcgtataaacaggattatgaagaagtagcagcattggttttccgattgtttgaaagccatcagattttccctaatacaattaaaaagattgatccatcacttgaaacgattttcttggaggtggttcaatgaagaatttgtattttttcacaaaaaaggaattttttgaatgttggcgaacatcacgctttttgattctagtcattatttttctcatttttggtttaatgaatccattgctagcaaaactaacaccagaaattgtaaagatgacaattggcgatgcgatggctagtacaattcccaaacccacatctatcgattcttggacgcagttttttaagaatcttacgcaaatcgggatgatcgttttagctttgatgtttagtggcacggtcaacaacgagattaataaaggaactcttattaatttagtgacgaaaggattgcgccgttgggtaattattgttgggaaaatgattagtttggtttttcaatggagcatttgttttctgctgacttttcttgttacctggggctacacggcgtattattttccagataataagagcacacagctctttcaagctgtttttccactgtggatttttggtttattattactaagccttgttcttttatcatcaaccattatgcggaatagttatgaagggttgcttttgactggcggtataattgtgattttagtcttaatcaatctatttgataagctgaaatactacaatccgatctcgctggtcacacaaaaccttaacttcctgcaaggaacagtagatattcaaaaatacttgccagcgatactaataagtattctattttttgcactggcaactttactcagtatacaaatttttaataagaagaaattgtaattttttgggacctaactatgtaaattaggtctcttttattgtttttgaaagaaaatagtaggagcgtaagattcaaaattaaccatgatttagaactatagcagttaaatcaaaatcagaaaaaataatacactattagaaaactgattacaaaaaaacaccaacaaaatgtcggtgtcttgattagttaaataaatagataaatgacagaatagatgtaatatgccagtaacagcaaagcgacaacgcaagaaaattttgagaaaaaacctccgcgtttagggctggtggattgacgcgattgtcttcgtgtcatttcagttatatcaacatcaactgtttttggtttttttgatccacccagaagcacaactgctagtaaatcgataaaaattaggccctgtaaaatgatactgacgataaaaataatttgatcacctttaatcattctaaacaggaacaagataatcatcaagagatcgaatagtaatgttagtaaaagcgccataacaaagctccttcaaattggttagaataaacaagctttattatagcatactactaatgaaaaaaattacgaattatttatgaaagattcacacaaagacatcaatcatggtgtttgaaaaaggtgtagatcatccaatataccataaaagtgacaagtgatataaacattaaaaaggctaatgtccaagctccttcaactggttggtaatgatgataattcataagtaaataaatgcacaaaaaagtcggggtcaaagaaaaatataaatgaatcaatactcgatcttttttgaataagtaaaaatagatgatagtcattaaaaaaaagatcaaataaatgatccatgatactgcatcaccaatatccatgaactcccctccctcataaatgattatatcagaatacggactccaataaataacaataaaatgagaaacaattagctttattaatgagaaaataccattttaattttcattcaaagattcttattaatacatgttttttgacagttatgttcttcctttaattttaaaaaaatcaaagaaactggaaaaacattgttatttaacaatttttacgatccaatactaaataaaagaattttacattgtgattaatttttgttactttatataaagagaggtaagaaataaaatattaaatgtaatcgttaattaatggttaaaacagggggatgacatggattataaaaagctattatgtagtgtgatgttgctaggaagttttggaacctcgaccttagttgcttatggagaagaaaaaacagactttaccagtatacaggagagttcaagtactatcaattcttctagttctacagtaaaaacggacgattcaatttcacaagaagctgattctggattagtgaactcagatacgacatcgtcttcgaatgaacaaaccgagtcaagtagtgaaagcggcgcggtagatgaagaggaatacgatgctcaaggaaacttacaatttcatcatccagttcgatttgaggattttactttagaaccgcctgcgtttagaagtgcacgatcagctgtgaatacacaacaagcttttatcaatcaaatagctccgtctgctaagacattagcaagcgcaaataacttatatgcttcagtaatgattgcacaagcaattgttgaaagcggttgggggagtagtacgctttcaaaagctcctaactataatttatttggcatcaaaggaacctacaatggacaatcagtaacgatgaaaacacaagaatggagtgaaaaagaaggttggtattggattgatgctaagtttagaaaatatccttcttataaagaatctttgggtgataatgtaacgatcctcaaaactacttctttttcatctggtaattactattactcaggcgcgtggaagagtaacacaaagtcatacaaagatgcgactgcgtggttaactggaagatatgcgacagcaccaaattatggcagtacattgaatagtattattcagagttacaacttaacacaatatgatactggtagtagtacatcaacaccacaacctgttcaaaccaatgcaatgtatcgtttgtacaatccgaatagcggcgaacatttttatacagcgagtgtcgccgaacgtgatacagtcaaaaaggcggggtggcggtatgaaggcatcggttggcaagcgcctaaaagcggaacccctgtttatcgattatacaatcctaacgctggcgatcatcattacacaccgcacgcatacgaaaaaaatgatttaatcaaaaagggttggcgttacgaagggattagctggtattctggtggaagcaagccactttaccgtttgtataatccaaatgctaaagcaggtgcacatcattatacacttcttcaaagtgagcggaataatctgataaagcatggctggcgtaatgaaggaataggttggtacggacagtaatcaaagaatttaaatagatatttgagtagctttcaagagttagattttctcaactaacttttgaaagctatatttatatcatcaaatataggtttaaagttgaggtatatagctgattaataatcctctgtgataaacactcaccttttagaaaattgatacctgaaaaaggagtgggtcataccactccttaaaagtctaacattgtaagttgaaaatttcgctattcagcatcagttatttcggaaattacaaaaaagctatgaaggctatcgattgagtattcatattttttgcttatttcacaaagtatttgctggttagatttaattatatgctcgtttccttcatataaagtatccgttggaagatgaatttcaaacgattttttgttgtctaataccaatggtttttcaaagaaatatccagcaatctttttcatgagaattactccttttctattattttgttatatattacatcattgatgtaagtgaaaccagaattaagctctataacagttgtaatttaaatccacctcaaaagtgcaattcctaaaacacctgttaagacaattttcataagatccttggttcgaattccaacgatcaacgcaggtatacaagcaaggacttcggggaaacgcaaagttggaaaatgccccgcttgataatttagaagactttgcattagtaatgctgttaatatcgtcataggaagatagcttaaaaatttttcaagtataggcggtaaagtgattgccttagtaagtataaaaggtaagactcgtggcacccaagtaactatagcacagcccaaaagtgtaagcagataataattattattcatccttcatcaacacccccgtgaagcaaccagaaagtgttgctaaaatgacagataattcagcagatataaaccgcatcagaagaaaaagactgatgattgtaactattaaaatagttatcgtcttgtttttttgtttcattaaaggtaattgaatctgaaagagaaataggcctaaaaacatcgcagttaatgcaaagtcgaatccgaatatcgtaggatcaggaatgaaattgcctaataatgcaccaatcacagttgaaagtatccatacaaggtaagcggttaaatttaatccgtgcatccagttacttgagactttcttttcttgtgctagagtagtcattaatacaccgtaagattcatcggttaataaggttccgatcgcaatcccatttagtaaagagtcctccttgaagtaatgagcaacagaaagactcatgagtaaatgtcggagattcacaagaaaaacagtgaatacgattgatagaatgggggcacttaacaaaagcaatccacataagataaactgagcacttccagcgtatactaaggtagacatcataaaaatttgccaaatggctaaatgagcagatttccccacgatacccatcgcaatacctatacctagatatcccatgactgtgggtaaacaagccttgactccgtctgaaaaactattggtttgtgttatacgattatccatctactcacctctcattttgttttaatcatattagactaaaagcaataaaaaaacaagagggttagtaagcgaaaaaagagcaacaaacctaaaagcaaagatatataagctaattaggaagtttctgctcaatttattttaccataaaattattagggataaatctaaataaattatttatttaagtaaataacctaaaaatatttgtaatgagggtttagcctttatttttcttaaaagatatagatgatgtataatgaagaaaagggaggcgttatcaatgaaagaaagttataaaaaaatacttgtcgcagtagatggttcaacctcatcaacaaacgcatttaatgaagcgctaaatgtagctgaacgaaatgatgcgaagctctttatacttactgtagttgatttcaaattttcaatcggtgatccagcgtttatcaatgatgctcttaaatttcatctaaataatgctgaaattgaattggagcaattagttgctaattccaaagtgagtcgtttagactatgaaacaaagattgattcaggtaatcctaaacgtaagattattgattacgcgttggaaaatcaagtagatcttataatgttgggggcaacaggcagaggtgcagtagaacaggcgatagtcggttctacgacagcatatgtagtaaaccacgccaactgcaatgttatggtagtgaggtcttaaatcgatatatttataataaaaaaagtttttgcctcgatagaagcaaaaacttttttattgggatagtagggctcgaacctacacttacctgattcagagtcaggcgccttaccagtttggccatatcccaatgagaacagaaagaattataacgctagtttttcaattcttcaactaaattgtctcgcctatttttttccagcccttttcaaagctgctaagacaatatttccatccgcaaatcccaaattaattttgataacttcattatcaaaaattaaagacagtcgaataccatttaatttctttttaccgcggatttctttgcattgataaagattgtatttatatgctttttgcttacttaacacatatagtgtattgccggaaattccataagcactcaaaccctcctgtttctttaggttttcatatttgtggaaaccaataaaagaaaaggaaaaggttgttttaggaaatgcgtgaagaaaattgttaaacaactgagtgcctttgtcttcacttgtattataattaattccgtatgttttggtaaattgataaagttcatttgcagtgttcataataacctcgcttttttgatagctttagtataattgtttcttttaatagaaacaatcatttatcgtgtgaagcggcgggcattgatgaattctgaaacggccatggtgataagtagaaacccaaatagttgaaaaagaatcatcatgctgctaaatggattaaataaaaggaaaaaaccagcaatgatcattagggcgctatagatgatctgacctgtaacaggaaagccatcgcgtttagcagtccaactttgcatgaattgactaattgcaaatatcaggataatgaatcctaaaaacattggcaaaatactgacaatccctttagagaaccaaagaacgacaaaagcgacaagcactcgcataataccactagtcgtctcaaatccgatgtttcctgtatatttttttgttctcaagccgcggataatctgtaaaattccaaaaattaataaatagaagaaaatgatgtagataattcccctaaagacgcttcgtggcgagaataatatagcgattccaaggatgagataacaaacgcttctcaaatatccatactttttaatcgaatcaataaaatttgacataaaatatcactccttactaataattttacccgatttgacgtctttttgctaatgaagtgaaaaattcgattgtaaaccattccatacttcggtataatgcgaataacattgatccaaaagctagacgaacaaatgaatgtcgatactggagggcttacttatgaatgaagaagaaattgagcttggaagaaattatcgttgccatccgattggtttcgaagaatgtgtagaaggcgaagtcatttcaaaaatgacgaattgcgcagtggttcgtattaaccaatgcgaagaggtagatcaagagcaacgagatgacaaatctaacatggtcgtggtaaaatattctaatttcattccaagttagaaggcggttcttttgaatatattaacattgttattgggaatttttacggttgttttgtatgtctttttatgggtggcacgcaaggatatcgttattccggtttttaaacgtcgcaagcaatatccattttatgttttcttggcgctgttgattgtatggatcggatttagtagttggcaagatataaatgggcgtacacaaacgattttagctgcattagtaatgttaagttttttgttggacaaaaagggatttacagaagaaagtttagttctttttgggttggacaatcgcggaattccgttaaatgaaatcgagcgggtggttttgtttcaagaagataatggattaatcaaacttaattattttcgtaaacagcgtcgcggaccgattttaacttttgattatccattaactgagcttgttgttttcctctcgacgcacctcaatgaaggcagcacattagaaatcttgactaaggatgatcaagacaaaaatggaaaataaataggcaacgctgaaacaaaatcagcattgcctattttttatttattgcgaattaatggaaaacgcggaaacgttcgtcatcagctaggaattctttttcgttggcttcgccttctttagagccaaaaactaattgagaacgtaattgccaattagctggaatattccattcttcagcaacagcatcgtcaatcactggattgtaatgttgtaggtttgcacctagtcctgcagagtttaatgcagtccaggtatttgctgttgcaataccatttgattgttcagcccagtcagggaaattatcagcatacaaggcaaattgttcttgcaaatttttcacagtatctgtttctttaaagaacataacagttccgtaagcgttacggaagctggcaattttagcttgtgtgttaggaaaagcttctgctggagttaacggcttcaaagcttcttctacgatattccataatttttcatgagcgtttccaaatagaatcaccgcacgaggtgattgtgcattaaaagccgttgggctatttttaacagcatctttaattaatgttgtgatttcttcttcagataatttaacgtcatgtcctaatgagtaaaatgaacgacgatccttcaatgattctaaaaattgtgacataataatttccaccttttcttgttttgttcttgttgacaaaaactactttatcatcttactaaaagtaaggaaagaaatatgctcgcgaaaaaaattaatttttttataggggagtagatagctacgattaaacaggtaacaatatgataaactattattatgaatgtaaatagatggaggctcacaaatgaatatgaaagagataggcaaaactgttctttggtttttaatactgggagcaattttgattggattgcgtcattttgtttttactcctgtagtcgttaaaggggattcaatggatccgacgctgattgatggtgagcgtgtcattgctttaaaaaatacggagatcaagcgttttgatattgtgacttttccagcaccagatgatccagggaaaaactatatcaaacgtgttattggtttacctggagataccatcgagtacaaaaatgatgaactctacatcaatggcaaagagtatgaagaaccatatttagatgagtttaaaggggaattagaagatgatcaaccattgacctctgacttcactttaaatgacctgtttggagcagaaaaagttcctgaaggagagttatttgttttgggtgataatcgtcggatttcaaaagatagtcggattattggaatgatcaaagaaaaaaatataatggctgatgtaaaatttgttttctggccgttagatcgatttggcactgtggactagcaaaactgctagtcttttttgtcagtttcgataatagcaataaagatatatgcctattgtatctaaattatttttttgaagtgttccttgattagtaaaatattttattttgaaaatagtccccctgtggttgctttacagacttgtttcaatcatgcgaagatttaaatgaactgttataatatataggtaacataatttgaagaaatgaggggaaacgatgccattacaatttttgttaggtgctggacaaaatgacgcgaaagaacgtatggttcagaaggcgcaagcttggttagagcaagatccgacgaatcgtgtgtttttcttagtccccaattacaataaattcgaacaagaaatcagtcttttatcagcaatgaaacagaatactaaaaatgtggaatttagtacaattcgcacgcaagtttttagttttcaacgtctggcttggttctttttacaacgtgatggtcagataccagggaatgtgttgtctgaagctggtaatgcaatgattttaaggaaaattctccatgagcggcgagaggaattaacgatttttcgcggagaagtaaataagactggttttattcagcaattagttagcttctatcaagaaatgcaaattgggaatgttacagttgaagatttagatgaaaatggaaacgacatagatcaggtattaaaattgcaggacttgaagaaggtatttgccgcctacgaagaagccttgctaaattatcaggtaacgaatgatgatactttgctgctattacaagcttatttgagtgagcaaaatctttccaatactctttttatcgttagtggctttacgcgctttaatgctcgtgagttaagtgtgctgaatacgttgatgagttgtggagagctatttgtgtcgctggaattagatcggccttatccaaatgaagaaccaaatccattgaatttatttgctgatcctggaaaaacgtattttcagttaaaacgcagtgcggatgcacaacaaatacctgttcgtcctgatcaatttgcgcgaatgaatcaaactgttttcaatcagatcggtgatttttgggcaaatcagaaaaaagttgatttatcccaaacaaatcaacttaagctaacgaaatatgctacagttgcagaagaaatccgcaagattggcgaagagattcgacgtttagtcagggatgaaaaataccgctataaagatattcaaattttgatgcgaaatccgaacgtttataatagcgttttgcctgatttgtttcaaaaaatggctattcctttttacttagatgaaacacaggaaatggcggcacatccattgattgaattcttacaagcgttgtttttaatcgacaattataattatcgaattaatgatgtttttcgaatgctgcgaacagaactttttgctccctttgattggcagccagaaacgtggtatttagcgcagcagaaatatagagaaaagattgatcaaacagaaaatgtttgtctagcttacaactttcgcgggagtgcttggacaagatccgcagattgggagttcgttgattacgactttgaagcagacgtctttaatgatgcgaaacaactagaggaaacaacaaatgacgttcgccgttctgtacagcaattattgccagcattcttcgagaaaattaagggagcagagaatggacttacagcagcggcaactttttatcattttctagaagaaagtggtgtgaagcgtcaattgttattttggcgcgatcaggaagttgctaaaggaaatcttgataaggctcgtaatcatgagcaaacatggcaagctttgcttgatcttttagacgaatatgtattgatttacggggcagatgcatttgattgggaaatttttcaagatatcttcttggctgggttaatgaatttaacttacggaaaaattccaacagcgattgatcaagttcgggtgaatgatttagagctggcacgggtggatcaaatgaaagtcacctttgcaattggactaaacaataatgactttccggctcgcttcgatgataagggattattgtcggcggaagagcgctccgcttttaatcaaaatctaccagaagggaaatttttgcctgaaagcaatagctctaaagtgaatcgtgaaccattcttagcttattcggtctttctatctgcaactgaaaaactgtatttaagtgtttccacaacggtggatggcgaaaaaaaattggagatctcatctttcttaagacaattaagtcaaggattgaatataccagtcaaagaaaatcagccattaagactaacaagcgcgcctgaggatcatttaggttctatgcggacattactttcggatctgattgctttgaatcgttacgcacaagatgaaaatcgagcgttcttaccagcttggcgggagcttcagaagtttattcaaaatagttcactagctccaatggctcagcgtgtctttaagagtctccaggatcttaatgtccctcgagatcttttacccgaaacagcagaacagttatatggaaaaaatctctatgtttcagtttctcgaatcgagaatttttataattgccagtacaagtatttcgcaaattttggtcttggattaaaagagcggactgtctacggattaacaccggctgctgctggagatttttaccacgaagcgttagatcatttcttccgcatactaaaggaacaaggacttcgtttggctgaattgaatgaagcagaacgtaatcaattggctgatgaagtattgaagaaaatcttcggcgaattgaaatttgcgattctatcaagttcggcacgaatgaattatattcgctatcaattgtcacgaacaatccaaaaggttagctggggtttagtccagcaaggaacacgaacgaaatttgaaccgcaacaaacggaaattatttttggttctattggaggacaaaagggaatccccggtatcaacctgccattatcaaatggtggaaaagttgcaattcgggggaaaattgatcgcctagatcagcttgaaagtaatgagagtgattggcttagcgtgattgactacaaatcaagtcctcatagttttaatgttgctgatgcgtactatggcatcgcgttacaattgattacttacttggatgttgcggtgactgattttagtgaagctaaaggtaaggaaatcaaaccagcgggagcttattatctgcatgtccataatccagttttaaaagactctaaaagtattgagaaagatatgctgaaggcctatcaatatgacggattatttgcgaaggagcctgagctttacgatcaattagatcaaagtttacaagaaaaagagagctctcttttatttccaattaaaaaagataaaaatggacaaacagtcatcgtgtcgcaatctaaagataagttttacgacctatctgaaattgatattttgcgtcaatacaatcgagaaaaaattcaaaaggccggaaaccaaattgtttctggtgagataaaattaaatccaacttacaaggataaccaacggattgcgtgtcaatactgtcctttccggagtgtttgcaaatttgatgcgatgttgaaggaaaataattatcatcgtctagaaaaactttcgaaggaagaagtcttgaaacgaatggaggaagaactacatgacaattaatttttcaatccctcctaaagctccaaatgaaatgtacactgattctcagtggcaagctatttatgatcaaggaaccaatcttttggtttcggcttctgccggctcagggaaaacagcagttctggtgcggcgtgtgatcgaaaaaatcaagcgccagcagctttcagttgatcaacttttagttgttacctttactgaagctgctgccaccgaaatgaaggaacgaattcaatcagcattgcaagaggcgatcaatgaggaaacagatcaaaaattaaagaatcattttactcatcaattaactttgttaccgatggcaaacatttcaacattgcattccttttgttcgaaagtcattcaacgttttttctatttgattgacttagatccgagttaccgaatgctgacagatgacacagagacaattttgttaaaagaagatgtttgggacgagctgcgagaaactttctatgaggaaaatcaagaaatcttttaccggttgacggagaacttttcaaatgaccgcagcgatagcggcttagaggatttgattctctcgatgtatgagtttgctcgtgcaaatcctgaacctttcgattggttggatggcttagtagaaaattatcgcgtggagaatttaattgattccgagttatatcgtaagttgattcgtccacaagtcctgaatagtttacaagaaatcaagcaaacatatcaatggatgattgctgctagtcaaggtacagaggaattacaaaaaatcactgagttagctcaaaatgagcagcttatcacgcaacagatcgaagaattattaatcggagacgatttagatgctacctacaccatctttgaacagcttaaattcactacctatccatcgccacgaaaaaaggaaattaaggagctctatggtgacgtaattgttgaatgtaaaaattatcgagatcaagcaaaacaaatgctaacaaagattaaggaaatgtattttactgtttcaccagaagaacaagtagaacgattgcaagaagctttaccgatcgtggatgaacttgtccgggtagaaaaacgttttattgaagaatactcagcaaaaaaacgagaaaaaggcatgctagattttaatgatttagagcattttaccttacaaatactccgaactgacgttaatggtagtaaaccagcagagacttactatcgtcgccgatttacggaggttttagttgacgaataccaagatattaatcaacttcaggagacgatcttgcagcaacttagtaccgtggaaccaggtaatctatttatggtaggggatgttaaacaatcaatttatggtttccgtttagctgatccgacactttttatccaaaaatatcatgattttgctgatgaagacggtggacgacggataattttggcagaaaactttcgttcccgtaaggaagtcttggacttcacgaatttagttttcagtcaattaatggatcagtcggttggacaaattgagtacgataaacaggcggaattgattaatggctttacggcatttcctgaaactgaaaacttcgcacctgaattattaatttaccagaagaatggtgacgtgcctgaatggattgaagacaaagccatgggtgaaatttttatgactgctgcgaaaattcgcgagttgattgatcatggttttgaaatttatgataaaaaagacaaagcgatgagaccagcgcgctatgaggatatcgtcttgctgacgccaacaaaaaataataatttgacaattttggaagtatttaagcagttgggaatcccgctttcgatcaatgatacacaaaattattttcaatcgactgaactgcgagtgatgatttctttgttacaaatcattgataatccgtatcaggatatcccacttgctgcagtcttacgctcaccgattgttggattacaagaagaagagttggctcaggttcgactagcgttgccgcaaaaagagtattatcaagcagttaaggcttatattcagaacaaggaggatgctactgctaagaaattatcggattttctttcgcaattaaatgactggcgtgagtttgcacggcgagaagcattagccgatttattagtaaaaatttatgatgagacggcttatctagactatgtgttaggaatgcctgctggacaacaacgtcatgctaatttactagctttgattgaacgagcaaaagattatgaacgcagtagttttcgtgggttgtatcaatttattcggtttattgagaaaatgcaggaaaaagataaagatttaggagaaccgccaacagaagaagcacaggatgcagtccgcgtaatgacgattcatggaagcaaaggtcttgaatttccgattgtttttttaatggatatgagtaaaagctttaatgtacaggatactcgaaggaattatgtttttgatgaacgattgggtctgggcgtaaaactgttgacaccagaagatcgtattcgaaaagacacgttactcttccagacggttaaacaaaaaaatctaaataaattactatctgaggaaatgcgaaaattgtacgttgctctaacgcgagcagaacaaaagctgtaccttgttggttcttatgatgacgaagcttctgcctacaaaacatggagtaaagcagcattgaatgaaaatctagtcttagatgcggggctgcgaaatggacagaatgatagtttctttgattgggtggggatgacgctattcaggcatccactgatggacaattaccaaaaggaatatgtagtcaatcaacttcctgaaatcaaaaaacatccagcgaaatttaaagtagattttgtcgatcctcaacttattgccgaaacggtgcaggggtatcttccagaaattaaaacgctggaaatcccgcaaggagcgatcaatattcaacctttaaagcagcgattattgttcaaatacctttatcctgaggcaacaaagacaaccagttatcagtcagtctcagagttaaaacgattgtatgatgatcccgataatcgggaaactatggacctttcaccaacacaaacacaatatcgttttaccgaaactgagttaggtgagcccaagtttttagctactaaaaaagaaatatctgcttcagaaatcggaacggcaactcatttagtgatgcagctgctgccactacatgaaaatctagagaaaaaaatgattgaagatttgatcaatgatttggttaaacgcaaaaccctgacacaggagatcgctgataaaatttcgatcaataatattatgcattttttgaattctgatgtgggaaattttgttattaaaaatgctgaccatttacatcgtgaagaaccttttgcgatgctgttaccagcagatcaattattcaaagactatcaaaaccaagatgagattcttattcatgggatcattgatggttatttagaatttgatgacaaaatctttttatatgatttgaagacggattattatactcctgaaagagaaaaacaattaatagatcgttaccgtggacaattgcatttgtataaggatgctttggagaaggctaaacaaaaaccagttaaggctgcctatctcgtctttctacgagggaagaagacaatagatttgttaaaaactttttagaggtaggcaagatgtacttataaaaggtaagtgatgtgctatactctgtctatcgaggtgagaattatggaacaagtagaagtaatggacttttcactctgtccgaaatttgagaaaggctttcaaattttaggaaaaaaatggaacggtttgattattgatgtattgttagaaggcgggcctcaaagatttgtcgatattgctgcgaagatttccgatgtcagtgaccgagtgctaacagaacgactaaaagaacttgaatcagaaggcattgttggacgtgtggttgcttgtggaagccaaaagcgcatggattattgtctaacggaaaaaggcgaagctttgaaaaatgtgatgaatgagattcatcgctggggcgacacttggattacaaacgaagaatgtagttgataaatctttaaatttcttgtagtattggattagtcaattgaatagtttaaaaagcgttgatagaaaagagtagtctttttacgtcttaaagggagtgtctgtcactgactggaagcagactaagaaagaaaaagatgaagttcacttctggagcttgtcgaaagaccggcatagccgttaaagtgtgaagagcgtcaattcaattggcgaattaggatggtatcgcgagacctcgttcctttgttggaacgaggtctttttttgttttttaattatttttgaatcaatcatcggatacaagtgagttgttctcactttagcaatagggaaaggaagaaaacaatgagtttacaagaacaattagaagaattgaaaagtcagacgttagccaaaattgaagcggcaaaagagcttgctgctgtagagacaattcgtgtagaaacgctaggaaaaaaagggccgatcactgaggtattacgtggaatgcgtgatctttcagcggaggaacgtccaaaagttggtgcgtttgccaatgaaatccgtgacatgttgaagagtgcagtagaaaaacgaaaagccgagctaacagagcttgctttagaaaaaaagctgtcagaagaagctttagatgttactttaccaggaaagcaagtccctcatggttcgcgccatgtgctgactcaaattatggaagagattgaagatacatttgttggtatggggtatcaagtaattgaaggaacagaggttgaatcggatcactataattttgaacgaatgaatttgccaaaggatcatccggcacgtgatatgcaagacacattctatatttctgatgatctattattgcgtacccatacttcgccagtacaagctcgtacgatggaaaaacatgacttttctaaaggagcattacgaatgatctctccggggaaagtattccgtcgagataccgatgacgccactcacagccatcaattccatcaaattgaaggactagtcgttgataagggcatcaccatgggagacttgaaggggacccttgaggtattattaaaggaattatttggcgctgatcgtaatatccgtttacgaccaagttattttccttttactgaaccatccgttgaagtcgatgtgagctgtttcaagtgtggcggtaagggctgtaatgtctgcaaacatacaggctggattgagattctcggagccggtatggttcatccggatgtattggaaatgtctggaattgattcaaaagagtattcaggttttgcttttggtttaggaccagaccgaatcgcaatgctgcgttacggtgtcaatgatattcgaaatttttattcaaacgatgttcgtttcttggaacaattcaagggggagtaagtagcaatgttagtttcatataagtggttaaatgaatacgtcgatgtaaaagatgttgcaccgaaggatttggcggatcgtctttcattaacaggaattgaagtagaaggtctggaatcaccagaagccggactgaaaaaaatcgtggtcggtgatgtaaaagaatgtatacctcatccagattctgatcatctttcaatttgccaagtcaatgttggtgaagaagaattatcacagattgtgtgcggtgcaccaaatatcaaggctggcgttaaagtgatcgtcgccttaccaggttctcgaattgctggcaatgtaaaaattaaaaaaggcaaaatgcgtggtcaagtttctaacggaatgatttgttcattacaggaactcggctatagtgactcggtgattccgaaagagtattctgaaggaatttactacttgccgcaagatgccattgctggtgagccggtttttccgtatctagagatggacgatacaattatcgatttatctatcacacccaaccgggcagatgccttaagtattcgtggagttgctcatgaagttgcggcaatctataataagaaagtaaatttccctccagtggaattaaaagaagctgagaagaaggctagtgataaaattagtgtttctgtaacagatgaaaaggatgcccctcattatgaaattcggatcattgaagatgtgaagatcggaccaagcccacaatggctgcaaaatcgtttaatgaatgaaggaatccgcccaattagtaatgtcgttgatgtgacaaattatatcttattattgtttggccaacctttacatgcttttgactatgataaactaggcagcaaagaaatcctcgttcgtcgtgcgaaagataacgaacatttcacaacattagacagcgttgaacggatattgaatccggaaaacattgttattactaatggggatattccagttgctttggcaggagtaatgggtggattagattcagaaatctctgatgaaacaactacagtcgcgttagaaatggcgatgttcgatcaaactctcgttcgtcgcacatcacaaagctataacttgcgcagcgaatcttctatgcgtttcgaaaaaggcatcaaccaaggtgaaatcagcttagcaggcgaagttgcggcggcaatgatcgcagaattagctggcggcaaggttttacagggttccgttaaggggagtgaagttcatccgaagaatgtagaagtgagtacaactttggaaaacgtgaaccatttcttaggaacgaaattaacgcaagatcagatcaatgctatttttgaggcactaggtttcgaaacaaaggttagcaaagatattacaacagtcagtgtacctccacgacgttgggatattcgaattgaagcggacttgatggaagagatcgcccgcatttacggttacaataacttaccatctaccttgccagaagggcagacagttgctggattcttaactgatgcacaaaaatcggttagaaaagttcggagtcttttagaaggtgctgggttatcagaggctatcagctatgctttaacaacagaagaaaaggcgcaacagttcctactaaatgaaagcaaagtgactcgtgtggcttggcccatgagtgaagaacgatcaacgatgcgcttgaatttaatcagcggtttgcttgaagatttatcttataatgtcgcacgtaaaaataacgatgtggccttttatgagattggtcatgttttctatcaaaataacgatccaaaaaaagatttgccaattgaacaaaatcatgtggcacttgctgtaactgggaatgttgttggtaagtcttgggccggaaaagcagaagcttgcgattattttgcaattaaaggaatggttgaagagctagtcgaagggttgggtctagccgaagaaatctcttatcaagctttgcaaatgcctgagatgcatcctggacaaacagcgggaatctatttaggggaagaattgattggttttgttggtcaagttcatcctaaaacggctgcaagctatgagttgaagtcggcttttgtggcagagctgaatttggaagcaatgcttacccaagaaagatcaccgcttatatttgaagctgtatcaaaatatcctgccgtaagtcgtgatattgcaatgctagtagaggaaacaagtacgaatgcagagattgcagaaataattcgtaaatctgctggcaagttcttaacaaaattacaagtttttgatgtctatcaaggtgaaaatatcgaagctggcaaaaaatcaatggcttataatctaactttcgcaaatcctgaagcaacattgacggatgaagaaatcaatcgcatgatgagtaaggttattaaaaatttagaagaaaaatttcaagcagtcattcgctaataagtgaatcctgcttagcaaacacccctcaaaatgtacttttgaggggtgttttagctatttgaaaggaatttttaagccgatttcatttcacttgtagtaacaacatcgataccggtatctaataagtttttaatagcgatatcgccaattttgactggtgcctgtagttgaacactattgatttctttcatagcctccaggactaactttttagggataccgtccgctgttttaacagaacaaaggtgcgcatcaccgccttctacgcgaacagtggaggtcacgacacgaataggattcgttgcttcggctttgccgtattttacgcctttgttacagctgtgtccgctaacttggtaatcattcgcttcatcaacagttaagtggcagccttttggacacatgatgcagataaagtttttcatccttttgacacctcctccacacaaatttccaaatcaccgttttggactttatctaaaacttttttagataattttattttttccatctcaccaggaacaatatagcttttcttttgcttcgccaagatttctccctgtgatttgatcaaaatctgactgtcatcaaatactttgttgactcggaaaaagacttcgactttacgatccacattttcatctcgaatttgttggggaacaacgtaagtgacatgatcgccatttttgacggataagcattttgttagattcttttcttggtctaaaatataatcagcggcggctgagccagctctgatactttctgcggtaacaaagtcaaccaaatcatggacgtgtacgacattgccacaggcgaaaataccggggacagaagtttccatattttcgtaaacgaaaggcccgttggttttgttatctaagtttagattggcatcacgacttagttcgttttcaggaattaacccaaccgataataaaatcgtgtcacaatcaaaggtttgttctgttccagaaatcggctgtcgtttttcatccacttctgaaacaacaacttgttcgacgcgattcttcccacgaatttccgtgatcgtatgagaaagatataaagggatatcataatcatccaaacattgaacgatatttctagttaacccgccggaatagggcatgacttcaacacaagctaaaacttcagctccttctaacgtcattcgccgtgccataattaagccaatatcacctgaacctaagataataacctttttcccaacaaggtatccttccatattgacatatcgttgggcagacccagcagtataaacgccagctggtcggcttccagcaataccaatagcaccgcgtgttcgttcccggcagcccattgcaaagattaaagctttagtgtttaagatttgatagccattttccttattaacaatgtgaacttccttttcttctgttacttctaaaaccatcgtatctaataaaacctttatatcagtttcttgaattttttcaatgaagcgcgctgcatattcaggaccagtaagttcctctttaaaatagtagagaccaaaaccattatggatacattgattcaaaataccacctagtcgttgatctcgttcaataatcaaaatatctttgacaccattttcgtaagccgcgactgccgctgctaatcccgcagggccacctccaattacgatcaagtcatgcatatcagtgtcctcctttcgttgcttcgactaagatatagctgccttcacggtcttgcaggatatccaaaggtgatttgttcagttcgtcagctaaaatctcgacgactctaggaccacaaaaacctccttggcatcgtcccattccagcattgcatctccgcttgattccgtctacagagacaggagagataggcgactgtgctgccgctctgatttcaccttctgtaacggtttcacaacgacaaacaattctaccgtaatcattattttttgagataacagtgtttttttcagcagaatccaattcttgaaaaactattttttcacgagaatcaataaaggtattctttagagtaaattttttattaacagatttttccaacatttctattccgtatagtgcaatagctggcgcagaggtgagaccaggggatttgactccagccaaatcgataaagccaaagtcagcttcctgtaaaacaaaatctccagtagaattattcgctcgaactcccgaaaagtttcgaatcgattgccgtaaattaagatcgggtaccgattttctggctaattctgcaacagaccttaaacctgccgacgtatttccagtatctcttccagtatccaaatcattgtgtgagacggcttctgagttagggccgacgactaaatttccatgaaccgttgggctaatcaatacaccttttccgacgctagatggacattggaaaattacatgattaaccaccttaccttctgatttatccaacaggtaatattcaccacgttttggtgtaatttcgaaattcggttcagcaatcaggttatgaatatcatccgagtgaacaccagcagcattaaaaacatattttgtttgataagtcgatttggtggtggtaatttcatagccatcatcaagtttcttgatgtctgttacgcgattattcaaagcaatctctacatcatttttaacagcagtttcggctaaagcaaggcaaaattcccacggatttacgattgccgcagtgggagcataaagagcgcctaagctctcgtgcgaaaggttcggttctttttttaaaagctcttcttgatttaaaagctcaagatctttcacgccattttttacgccacgatcatagagtgttttgataagtgcgagttcctcctccgaaaaggcgactacaagagaaccaatttggtcataatgcacagaaagttttttacagagttcttttgcccgttcagcaccttcaacatttagtcttgccatcagtgaacctggttctgggtcgaagccagcatgcatgattgcactattagccctagtggcacctaggctaacatcattttcagcctctaaaattaaagtttttagttgatacttactcaattcataggcagtggcagcacccacaataccacatccaattacaattacgtcgtacataatagatttccctcccaataatagagtcaacagctcccgttatatctcctccaacgcgcatgaaaaaagagtatagggaacaaacgccaatgtttgttgacgtttgccgctatactctttttatctctagcagttattaacttatctgtattataacacctttagaaaaaatcaacaatcgttaaattgaccaaattgcacttgctgttgttgatacagcgaggcttcctgcacctaaagctcccataatatcttctttgtctcgaatcaagccaccgacaatcaatggtttttttgaatgatgaacgagctgtctaataatttttggagagacattgggaagaacctctactaaatctgcttcagtgtatttcagttgtcgttccacattctctaaagcagaagaatctagtaaaaaaaaacgctgaatagctaataattgatgctttttagcatgacgaatgattgctggttttgttgaaatgattccatcaaatgaggtagctttttttatatagtcaatggctttttcatctgaagacagccctttgactaaatcagcatgaaggatcgcggctttcttactcgttttgattttttgagagagttcagctaactccatcaagtgcgattgaaggataaaaataacctcagcttcagacttcagcgcagcttcgagttcttgttcattttttgcggctgctattactggtgagagttccaattttttataaagttcatgagtgttcatatatcgtagctccttatgctttctccgttttcattttaccatgagaaaaaaggaagagatagctctctttatacgacctataagaaaaagctctcgaattaagagctttgaaccgtttattcagaaaagacagcaaatttttaataggttctttctaataattgcatagaaacatgtcttagaacctctttgcttttggtatcgggtaattcatgtatttccgctaacgcctttttcgttagtttctgagcaaaatcaagtgagccagctattccgccgaaactttctacataataagccaattgtatcaaatcattacgtgataatgtttcaggcttttctaggaaaggtcgaataacagtaggctgactatctcgagcaatcaataaaggtaaagtaaaaataccttgttgtacatcagttaaaataggtttttggttatttcctaatactaaggaaaaattcaaaatgtcgtcataaacttgaaaggctaaaccaatagccgatcctatccgttttgatcgagcctgtaagattttatcagcgccaccaaaataggcgccttcatgacaactaagacgaataagttcagccgttttcccattgatgttccgtaaataatcgttgacagtttgatcgggattaaatgtacaagtcatctgtgtcaattcgccccgaagaacttttttcattgcttgagcgtttttcaatagaaaaggagtatgactcatacattcggcgagtaattcaaagtaactagtatacataaaatctccagtgtaaacagcgacgtcttttccaaagcgtgtttggatcgagggcattcctcgacgtgtaggagagtcatcaataatatcatcatggacaagcgtagcagaatgcagcaattcaagcgaagctgcgacttttattaattgttcgtagtcttttttttctccaaaatcagcgaaaagaaagaagagtgccggacgaatcatttttcctcctgtagaagaaaattttgtgatggcctcttcaatcgatttattattaataacaagtctttgtgagatcaatttcttaacttgaattagattttcctgtattttgggatattcattccaataatctagcatgggaactccttcttacaacgttttcatttatattttagcgcatagcgctattaatgactactagaatgcttaatgaatgtttattgaaaggacacgtatgattgacaagcaaatcttttgaagaaaaagtataaaaatagcataataaatacgaaaagaaatttaagaaagttgggtgaaatgaatttaaccgttttcttggaactcgtggaatttaaagcgaaaaccgcgagtgtcctgcctttttttattgggatttgttttagcctgtataattttcacaaacttcatttaggtttagtcctgttgtattttatcgcgatgttcatttttaatatggctgtcgatattctggataattacaatgactatcaccatgcgacggaaattcacgactatcgagaaaaaaccaatatcattggaagagagaatttagatttaacaattgttttccgaatgatgattggaatgatcattgtttcggcactgattggaatcggtttgtctttcttagtcggatggccttttttattgatggggttattttgctatggggttggaattttttactcgtctggtccaagaccattatccagtctgccattaggtgaagttttttctggtttaacaatggggtttatgattacacttttgtgtgtctatctgaatacgtatgaagtatttcagtggaactttactaatttaggtggagtttttctgatttcgttaccaaatacgttgtggattgcaaatttaatgttggcaaacaatatctgtgatttagaagaagacgaaaagaacaatcgctttactttggttcattatttaggaaagcaacaggcacttcatttatttgtagggatgaatgtcatcgcttttctagctattcttatttcggtgttaattgaagttgcaccatggtctatgctgggtacctttatagccgcaccgtttattaacaaacaggttcaaatatttcttacaaagcaagttaagcgtgaaacgttcatttgcgcagttagaatcttagcagttggggctgctacacaaatgattagctttgcattgacgtttctattttaaaaagagatcaatttaattttgtcagttcgaatatttacgtcagaaaaatttgaactgacacacgagctagctcaagaatagacgatgcgaagtatagattgatatacaggattcgaatcggactaatttttttctgagaaataatttattaaagacgaataaggaggaaacaaaaaatgaaagaaatcgctatattaggcgcgggttacgcaggattgcgggctttgcatgtattacaaaaatctggagcagatatccatatttctttagttgatcggaatgattatcactatgagtcaacaagtctccatgaagttgcagctggtacgcaaccagatgaaaaaatttgctatagtataaaagatgtggtcaatcccaataaaacaacttttattcaagatacagtagaaaaaattgatgcggatcaaaaaaaagtttacttagaaaatcaaacgctgaattacgactacttgattgtagctctagggtttcaatctgaatcgtttggcatccctggtgtaaaggaaaactcccttgaaatggtagatgtgaaaactgctgatcaagttcataaacatattctagaacaaatgaagaattataaagaaactcaaaatgaagaatatttacgaatcgttgtttgcggcgcgggctttacaggaattgaactggtcggagcattagttgaaggtagtaaaaatttcgcagatatagctggtgtcaaacctagtgacatccaaatttattgcgtagaagccgttgataagattttgccaatgtttagtgataagttggggcagtactgtttaaaatatctagataaatgggatgttaaattattgactggtaaacctatcagaaaggttgaaccaggcgcagttatttatcaaaattcaagagacgatgaaaatgatcttgttgcacttaaagccaaaacgattatttggacgactggagttagcggaagtcatgtagtaggagattcgggcttcgaggaacgccgcggccgtgtgatggtcaagccaaatttaactgatccaaatcacgatgacgtctatttactgggagatgtctcagcagtgatggatccagcaagtaaccgaccttatccaacgactgcacaaattgcgttgaaaatgggttcatacgctggcaaggatattttgaatcaactaaaaggtgagccaagtaagccattttcattcaaatcattagggtctgtcgcgtcgattgggaacacacatgcctttggggtcgtgggtagcacagaagtaacagcttatcctgcatcatttatcaaaaaagcgattatggatcgctcgctatttgaaacaggcggtgttaaagaagtaatggcgaaaggtcgttttgatttctatcattaaaccgaaaaacaagaaatgaatcgtataaaaaagcactcgaaattttaatccgagtgcttttcatattagccaaaataattgatgcccatcgctcgcttcacttcagccaaagtttcagcagcaacagcttgtgccttttcgctaccttctttcaacatttgcatgatcgcatctggatctttagcaaactcctcccgacgtgcgcgaatcggtccgaattcagcttctaagacatctattaaataacgtttgattttaacgtcgccaagtccaccgcgacggtagttttctttaagctcagcaattttttctttgtccttaccgaaaacatctaagtaggtgaaaaccatattgccttcaacttggcctggatcttccacatgaatgtgatttggatcggtatacatactcataactttttttgctagaacatcagcagaatcggctaagtaaataccgttgcccaacgatttactcattttgccatttccgtcaatacctggtaaacgcccttgacctttttctggaaaaacgccttttggttcgacaagtacatcgccgtaagtatgattgaaactttgaacaatttcttgtgtttgctccaacataggtttttgatcttcgcctactggaacaaggtttgctttaaacgctgtaatatctgacgcttgagatacaggataaatgaagaaacctgtaggaacgctttctccaaatttcttttgctcgatttctgatttaactgttgggttacgccgaacacgtccgacgctcactaagtttaaatagtacatcgtcagttctgctaattcaggaatttgcgattgaataaagagagtggagcgtttagggtccaaacctactgccatgtaatcaagcgcaacctgtaaaacattagaggaaactttttcagggttcttcgcattatcagtcaaagcttgcatatcagctatcataataaatagctcgttttcagggtcttcttgcattcgtacacgatttttcaacgagccaacatagtggcctaaatgtaattgtccagttggacgatctccagtcaaaatggtatttttcattaactcaccttttcgtaaaaattctttcaatagtctcttcaaatactacctttttttttcaaacatgacaactcatatcactattttttatcctaatcaaaaccttattgatgttaataaacgttacatgaaagtggaaaatattgaaatatttttttcgaacattgagtttttttctttacaaagtaaaaaaacttagcttataattaagctcacattggaaaaattagagaacgataaggaaaatgaggtggtaagacatgccaatggttgaatttaagcatgtggaaaaatactatgggaagtttcatgccttaaaaaagattaacttgtcctttgaaaagggcgaagtcgtcgtggtgatcggaccatctggatcaggaaagagcacaatgcttcgatgcattaatggactagaagatatttcttctggagagttgctcgtaaataataagaatctccatagtaaagaagtaaaattaaaagatattcggaaaaacattggaatggtttttcaacattttaatctctatcctaataaaaccgcgttagaaaatattacgttagcgccaatcaaagtcttaaagcagtcgccagaggaagcaacaaaggctgctgagaaactgttagatagagtggatatgttagataagaaggattcatatccttccatgttatctggaggacagcaacaacggatcgccatcgcccgtggtttagcgatgaatcccgacttgctgctttttgatgagccaacatcggcactcgatccagagatgattggtgacgtgctgaatgttatgaagaaaattgctcgcgatggcatgtcaatgatcgtcgtaactcatgaaatgggatttgctaaagaagtagcggatcggatcattttcatggcagacggcgaagtcttagaagatacacgggatgtcaaagggttctttgaaaaaccacaagaggtccgagcacaacaatttgttagcaaagtaattaatcattaggaggcagtttatgtcgaagttaaaaagaatgttctccttactatttcttccattgctgcttgtaatagtgttgtcaggatgtaaaggagaaagcgtcgcaaatgaaaatatcgcgacgcgaatcaaagatgaaccaacgatcacgtggggcgtgaagtacgacacacgtttgttcggcatgatggacataaaaacgcgaaaagttgaaggctttgacatagatatagctaaagcgatcacgaaagaaattcttggcaaggacggcaaggctgaatttgttgaagtgacttcgaagacgcggattccattacttaaaaatgggaacatcgatgcaattatcgctaccatgacaattacggaagatcgtaaaaaagaagttgatttttcagacatctattttgatgcagggcaatctttgttggtaaaaaaaggaagtcacattaaaaacatcaaagatctaacagctaaagatacggtattggcagtaaaaggatcgacttcaaccataaacattcgcaaacatgcaccagaggccaaaattcttgaattagaaaactatgcggaagcatttaccgctttgcaatctgggcaaggtcaggcgatgacaacagataatgcaatcttactagggatggcatcagaaaatgatcattatgaattgactggtggcacattcacgaatgaaccatatgggattgctatcaataaagggcaagatgagttcttaaaagaagttaatcaagcacttcataaaatgcatgataatggtacgtacaataaaattttcgaaaaatggttccctaaagatgcagatggtcgtgcgaaaaagggggcgcagttctaatgacacaattatttcaaacattttcagctgattttgtcagtggatttaagtatacaatctatgcaagtttattggcgctagtttttagtctaattattggaacgataatggcaatcctgcaattgtctcataatcggattattcggagtctagcaaaggcttatgtcgcgtttttccgaaatattcctttgctgatcatcgtgatgttcttttacgttgtagcaccgatgtatttttatagctttgatggttttcaagcaggaacaatcggtttaacgatttatacctcggcatttatagcggagacagtccgttctggcatccaaacagttccaaaggggcagatggaggcaggactctcttcaggtttttcttattctgaaacaatgcgttacattgttttgccgcaagcgtttaaaattgtggtgccaccattaggaaatcaatttatcaatttaatcaaaaattcttcaattttggcaatggttgctgggttagatttaatgtatcaaggcgatttgattgccagtacgacttttaatacgtttgatacgtacattatcgttggtctgttttatttagttttaacactgccattgtcttatctgatgaactatttagataagcattggtcaaatgcctaaaaaggaaggggtaaaaaataatgagtgatgctttttcatggattaatttacgattccttttggatgggctgtgggtgacgattcaagtttcagttgtttcgattatttttagtatgatacttgggggaatcgctggaactgttcgttacagtaacattccgatactttcaaaggttgtaggcataatcgttgatattattcgtaatttaccattattactaatcatctttttcacgtattttgccttaccacaaattggaatcaaactgaatattttctgggcagcggttgctgcactgaccatttttgaatcagcgatgttatctgaaattttccgtgccggattaaatgctgttccgtctggacaaacagaagcgggaatgtcatctggtttaacttatgtccaaaccttgaccatgatagttatgccgcaagccttcaaatccatgttgccggctattttgagtcagttgatttctctaattaaagacacatcgttggctgtgattatttcactgccagagctgactcataatgcgaaaatcatttatggacagaataccaattacgtcataccgatgttcattgctatgacagctatgtattttgttgtttgctatttattatcagtggtttcaaatctgttagaaacaagtaaatataactattaaaaaagggctcttcgtcaaatcgtgttggtgaagacaaatttgaataaaacttagtccgatatgcggcgcgttctgtgcgccgcatatttttttagttttcaaagatcagaccttgttgtaaatagatccgtgcccgaaagttataaaagttgcgataaccaaacgcaattcgtttaatcagcttgatcttgttattcagcccctccgtgacaccgtttgagtgggacactttaaaggcatttgaaatgcccgattggtagcgatggaagatcgtgaatttctttttaaacgactgaggtaacgtagatgaaattgttttaagggtttcttgaaagccttccgtatctcgtttaacgaaataatagcgtaataattgacaaaaatgatacgctgttcgcaattcttcgttgtagcttaacagttcatcgacgatttctgtttgactaattggtcgtttaaacagtcgatgataatgccgtttgagtggctccaatgtcgtggaatctttgagtaagagtttccaatatcgcttgagccgacggtacttcttctgattttcagagtgtgaggttcgaaaacgattcatgatctggacacgtaattgattgaaactgcgattgatgtgttggacaatatgaaagcggtcagttacgatctccgcatttggaaagaccgttttaagcaactgacaatagctggcattcatgtccatcactaggtacttgacctttaaacgggcctttctaggaaagcgcaggaagtattgagttagtttgtaaagtctgcgatcttcaaggatcgtaaatagctgattggttgtcccatcaacacaaataaaactcatggaaccagaaacagacttcattgatttgaactcatccatacacaacaccgtcggaaggaagttcatacgtggctggtaatgcttcgttgcttcacgcaagatccgtgtcaccgtcccatccgagacgaagtacttcttagcgattagtttacgtgattgattttcgtacagttccatgagaatcgcctgcttcagttcctttgttagttgatgatgttcatcaactaagtccgttttcgcagaaaaggtccgtccacaatcatggcagagaaaacgggtacgttttaattctaaaatagttaacttttctttgactttcaacatctgagtgcgtgtcgtataggaaccgttgcggataatacgaaccgatcgacagtgttcacaacaggaaggagagtcatccaattttcctttaataaactgcgcttgaacgcctttatattctttttcaatcagccattcttcatcaaaaaataaatgtttatctgttaatccgagtaattttctagtatgattatccattgagagactcctttggtagggtgacgttttggtcgactaaattttaccaaaagtgagtctctttttgagttgaaacgaagaaaaaagtgttagtagaaaatcgccttcgattttccaccaacacaaaatattatagaacctaaaaaagtgaggctcttctcaaagaatgagagcctcactttttctattctttttctttttctgttttacgttcagtttctttcatagctggatcttcatagatagcgccggcttccgtttttcccagtttttctaaaacactaggctcatgttcgtctttgcgattttccttctttttctctgtttcctcttcggttgctttgattgcaggatcttgattacgatcaccagcagaaactttccccatgttttcagttagttcttttttatccattttcatccacctctctcagaattagtgtagcattaattgttattcattcaaaagaaaacgctttttataagtcggggttctagggcttgaaatatttcgttaaaaagtggaaaataagatgaaacttgtaacaagataggatgagcgttttgtcaaatgaaagaccaattggatttattgattctggcgtaggcggtttgacggtagtcaaggaagccatgcgtcagctacctaatgaagaaatcttatatcttggagatacggctcgttgtccgtatggtcctcgaccagccgagcaagtcattgagtttacctggcagatgactcgttttttattgaagaaaaatataaagatgcttgtgatcgcctgcaacactgcaacggcggtagcgttagatgaaatcaaaaaggctgttgatattcctgtgattggtgtgatacaacctggttcgcgcgcagcattaaaagccagtaacacaggacgtattggaattatcggaacattaggaacggtcaaaagtggttcttataaacatgagctgcaagaaaaagcaccggacacttatgtatccagtctggcttgtccgaaatttgttccgattgtggaaagtaatcagtttaatagctcagtagcgaaaaaaattgtttcgcaaacactggcgcctttaaaaaaagaaaaattggatacattaatcttaggatgtacccattacccattattacgcccaattattcagaatgtgattggtcaacaggtgacattaattgattctggggcggaaaccgttaatgatgttagtacattattggattatttcaatttgaataattatgaacaagttgaaacaaaatcgagatctttttacacaaccggctcacctaagatgtttaaagatatcgctggtgaatggttagatattacgaatttgaatgtgacacacattgatttaggaggagaataacttgcgacatgatggaagagcggtccagcaattacggccgattaagattgaaacgaatgtttttaaacatcctgaaggatcagtcgtcatttcttttggcgataccaaagtaatttgttcagcaacactagaagattcagttccgccgtttttacgtggcagtggatccggttgggtgacagctgagtacagtatgctcccaagggcaactaatacgcgaaataggcgtgaaagcgcaaagggaaaactatcaggacggacgatggagattcaacgtttaatcggacgttctttacgtgccgtgattgatttagaaaaattgggtgaacgcagtatcattgtggactgtgatgtcatccaagctgatggtggtacgagaacagccagcattactggtggattcgtcgccttgcgtttagctgttaacaaattgttagccagtggtgaactagcagaagatccaattaaagaacatttagcggcaattagtgtcggaatgctaccagatggaactgtcgtgactgatttagactatctagaagactcttcggctgcagttgatatgaatctcgtaatgactgaatctggccgtttcgtggagattcagggtaccggtgaagaagctactttcaatgatgatgagttgaacgcgttgattttacatggcaaagccggaattgctgaattaatagcttatcaaaaggaagctcttttcgaagcagtagaaatagaaaaaaaaacaatcgtaattgctacacgtaatccaggaaaggctaaagaatttgcggctttattcgcaaaggaaggctatcaaatcaaaacactattagattatcctgatttgccagatgtcgaagaaacaggaacaaccttcgaagaaaatgctcgattgaaagcagaaacgattgcacagcttttacagcagccggtcttagcggatgattctggtttagtcgttgatgcgctaaatggtatgcctggaattttttctgctcgttttgctggagaacgaaaaagtgacgccgcaaataatgcgaagctacttcatgaattaacgaatgttcctgatgagcaaagaactgcacacttccactgcaccttggtctttgcggcaccacaaaaggaaagcctagtggtggaggcggattgggatggccgaatcgcgcgaattccacaaggagataatggtttcggctatgacccattatttattgttcctggctatgataaaacatctgctgaattgacctctgaagaaaagaataaaatcagtcatcgtgggatggcagtcaaagaattagaaagaacttggaaagaatggctggaggggaataaatgaagtatttaatcgttagtgataaccacggtgatcgcaacatcttagttgagatcgttaatcgctatgttgatagggtcgatcatatgtttcattgcggtgactcagaattgaaagcaaatgatgagctatgggaacatttcacggtcgttactggaaattgtgattatgatcctggatataaaaaggaacaagttgtttcaatcggtgatgatgttatttacatgactcatggacatttatcaaatgtacgttttggacttacgatgctttctttacaagctcaagaggcgggagcgaatattgctttgtttggacatatccaccaagcagtagcggagcttgataaaaatattttattcgtaaatcctggtagtatctcacagccacgtggacctgtgcgtatcccaagttatgcgatcattgacagcgagaacaatgaatatcgtattcaatactataatcgtgcccatcaaccgattgaagagttagctgcaacctttgaacgttagttcctaatttttattaaatttttggtgaaataccgctttctttttgccgttacggtaaaataaggtgaagatattagaacggaggcgtcatatgattagtcccgcaattgaacaattaatgatggaacatgaggaaaccatgatgattccggcagaaaatgttgcaaatgtgatgaaggaacatccattagagcatgcgttactgctgttgtcgcaggctggatattcaacgattccagttttagataaagaggatcattttgttggtttattgagcttgaatgacattgtaaaaaaaatgttagggatcgatggtattgatacatccaatttggaagagttaactgttgcggatgtcatgaaaacagatgttgcagtgatgcgcccagatgccgaactagaagacattttacatttattagtagatgcttctttcttacctgtgttggatcacaacggggtattctgtggaatcgtaacacgtagagaaattttaaaggcggtaaattatacctttcatgcttttcagcggaaaaatcctgaaactcaattaatttttcacgcgaattcatcaaactaactaaaaaactgaattttatatagaacagactctaagcaagtacttaaagtggagtctgttctttttgtgtgaaataaatctcttagctttttaaatgatggatacagataaattgacattcggcaataggcatgctattttaatcaagtgtttaaacagtaaccattacggttaagcttgattgaataaaaaataggagaaatcaatggcaaaaaaatctaaaattattaagatgcaaaagcaacaagctttgattgaacgttacgctgaagaacgtctaaaattaaaagctgctagagattacgagggattagcaaaattaccccgggattcaaatcctaatcgattaaagtcccgtgatttaatcgatggccgaccaagaggctacatgcgaaaattcggtatgtcacgaatcaaatttcgtgaattagctcataaggggcaaattcccggtgttaaaaaagcgagttggtaaaaaagccataagctagtcaattctggaagatttcctactccaattttgttaaactgaaagtattcaacaaagtggagaggagagatagtgtgaaaacggccctatttgttttgttagatcaatatgctgattgggaagcagcgtatctgttgagtctgctgaatcaaagagacgattggcaaatccagactgcttcaaatttacctctggtacattcaatcggtggattgcaaacaacagttgatctaaatttttcagaaattgatcagatgcatcatttgcttgttttgattggcggtgattcttggaatattcaaaatcaagaactttatcgaatgatcgaaaaacagctaaacaataatttaccagttgctgggatttgtggtgcagtagattatcttgcttttcatggttttttagaagggtataagcatacaggaaatagtcgtgtttcgtggcaggattttcaaaactatcggtctcctgagaactttatagaaaggcaggccgtcagtgatcgaaatcttgttacagcaaacggaacagcagcgttagattttactgagtttgtcttacaattaatcggagatagtctgattgaagcgaaaaaagaagttgatttatatcgtttagggtattatggttatcgggaaaaatatgggtatccatttgatcaataaaaaagaagttcattccatgaatttatcatggagcgaacttctttttattttccatacgcaactggattattgggaatactaaaaccgttttgagtcaaggtttggacataagcagataaaaattcttcctgcagcttgtattgttttccatttgttacatacagaattgttcgaattgcatagttgctattgcctaagtcaaccattccgaatagagtaggtccatcaaaaatctcatccttaaactcgtcggaaagcttttgattcgtttcatcaatcaagtggataatcttatcatatccttcgtctggttggatgcgaatatcaacctttacttgcatatgggcacgagaaagattgctgatggttgtaatgttgcgattaggtataaaatgaacagttccatctgcagatttcatttgcagcatacgaataccaacagaggtgactgttccctcaatttgcagatcggtcaatcgaatatagtcaccgacatcgatctgttgttccataataatgaaaaaaccagtgattatatcattagtgaacccttgtgctcccaaacctatggcaattccggcaattccggcacccgctaatagtgaacccacaggaataccaagcgtatccaaaatcgaataaaggaaaaagaaaaagagtgtgtaagaaaagacgttcattgacaaagcatggattgtttcaactcgagtggcattatctgccattttctttttctgccgatcaaaagattgattgatcaaaaagcttccgatttttctaattagataaaatagaatcaaaacagcaataattgtcatgcctttttgaattaaaactgaaaaaacgtgatcccaatcaatcgattgccaatatttttgccaagctgacaattgttccgtcgcctgatcgacaacattggtagtgctggaatccactgtttgtgttgtaaataaaaccataagccactcccattagattaataaaaatagtgtaacaatctttcgcttttctgtcgactagggaaaacaaaccttcattttctttttattgaaaaaaatcatgacaacgatgaaagaaagtgatagactaacatttaaataagaaggagatgatagaatggtgaatataaaatgggaagagttaggctttgattatatcaagacacctttccgctatatttctcattggaaaaatgggcaatgggatgatggcgtattaacagaggataacaccatcaccattaatgaaggctcgacatgtctccattatggtcaagaatgttttgaaggattaaaggcatatcgtcgaaaggatggaaaaattaatttattccgaccagatgagaactcaaaacgtttgaataagagtgctgaacgtcttcagatgccagccgttccagaagacaagtttatcgatgcagtgaaacaagttgtaaatgctaatgaagaatatgtacctccgtatggtactggagcaactttatatctacgcccttatttaattggcgtaggtccaaatattgggatcgttcctgcaccagaatatatatttggcgtattttgtatgccagttgggccgtattttaaaggtggattagcaccaagcaatttcattgtttccgaatatgatagagccgcaccatttggaactggagcagcgaaggtaggcggaaattatgcggcgagtttattgcctggtcaaatcgcacacgaccgtaatttttcggattgtatttatttagacccagcaacgcatacaaagattgaagaagtcggatcagcaaactttttcggaattacaagggataatcaatttgtcacaccaaaatctccatcgattctgccaagcattacgaaatactccttgctgtatctttctagtgaacgctttggtttagaggcaatcgaaggagatgttcgcttggatgaattggataaatttgcagaagctggagcttgcggaactgcggcgattatcgcaccgattgccggaattcaaaatggcgatgatttccatgtcttttatagtgagacagaagtggggcccgtaacgaagaaattgtacgatgagctggtaggtattcagtttggtgatgttgaagcgccggatggttggatttttgaagtctaataaattaaaaaaaaatcgtcgttcatggagaacggcgatttttgaggctctataatatctagtgttggtgacgccttctgttgccaatactttttcttttttctaataaacgcaaacagacaccttgaaatcctttagaataaagtcgacgaaaaccattcaaaggagtgtttcaagatgtcctattcagagtttaccaaagagttactagatattctagacctaaatcttatctttcatgaagatgcctttcgcaaagagcgaatcaatgacgaaacatgttttgtttttgatggcacattgacctatcaaccagaggaatgcttccattgtcactatcaaaataagcaaacgatcattaaatggggctggaaaaaagtatccatcttattgaatgatgtcagtaactacaagaccattctgcggattaacaaacagcgcttcaaatgtaaacactgtggaaagacttttttagcagaagattcagttagtgatcgtcgctgctccattgctcgcagagtcaaacaagccattcttgagctattaagcgaaccactttctatgtctttgatcgcacgtatgaagcacatttctccgaccactgtcattcgaatacttcgcagccttcggcctaaaaccgtttctttgaaccagccgttaccagaagtggtgtgtttcgatgaattcaaatcggtgaaaaacgtctcgggagccatgagctttgtcatgatggacggcaagacccatcaactgattgatattgtggaaaatcggcaactcaatcctttacgcgactatttcttgcgctaccctagaaaagtccgtgaacaagtacgtctagtggtttcagatttctatacaccctatcgcacattggtgaaagagtgttttccgaatgccagaatcgtcgccgatcgctttcatattagccaacacatcggtcgggcctttaccaaccaccgaattcaagtaatgaagacctttaaaaaaggggatcgtcggtcgaagcacttaaagaaatactggagactacttcaaaagaatgcgtgggaattgaatggtcagcatcgctactggcgtccgtcatttcgagatcatctgacagaagcggagatagtcgatcggctattatattatgatgactccttaaagcgaggctacgaagtctaccaggtttttctttccgctatcagaagacaagatgttcctgaattcgtcgcgctcctaaaagaagactacaaggagttgccagagcactaccaaccagtgttcacgaccttcaagaaatatcgaacagaaatcaaacgagtgttgcgagttccctattccaacggccctatagaatgtttgaacaaccatatcaaagtactaaaacgaattgcctatggctttagaaactttcaaaactaccgagaacgaatctttttatatcgaggaaaatatttcaagaaaactaagaacactacccaactaactaaagccagaacaacaacacggctagacaaaatagctgtctagccgtgtgagtatctcgattattctattgaatttcttcaccaacactcattgacgaagagccttttttgatattgtttagcttaagtgaacgcctttgtcgacatagatgacgtctccaatgatacctgtcgctaatggactaagtaagaaagcacatgagtttccaacttcttcgattgttacagcgactttatcaggtgtacgttcttcggataagctcaataatgattggtagtccttcacgccagttacagctaatgttttgattgctccagcagagatcgcattaacacgaatatttttcggcgcaagttctgttgctaagtagcgaacttctgcttctaaagcagctttggcaatgcccatcatgttgtagttagggatcgaacgctcagatcccatgtaagtcattgtcacgatgcttccgccatcagtcatcaatggagcagcatatttagagacagctaataacgaataagcactgatgtcttgagctagttggaagccgtcgcgagtgatctctgttacattgccagataattcttctttgttggcaaaagcaatcgaatggaccaaaccatcgatcgaaccaaatttctctttgatcaaagaaaaagcagcctcaattttttcatcactagcaacatcaagttcaaacatatttgcatcttcgccaactaacttgactaaatttttcttcattcgatcgttttgataagtataaatgatttccgcgccttgttcagcgatcgctttggcacatccccaagcaatactttttttattggctacgcctgtcacgataattttttttcccgttaaaatagacattaaatgacacactcctaaataatataaaaaataatatgctctcattatgttggaaaaagctttgattgtcaaactatttttttgattattccaatacgtcttgattaaactgcaagaatatgatagtttgataatcaaataaaatattcatagaggtgcaaaatgaaaaaaattatgaatgtcgaagaaatcatggctgcgattccgaatcgctttcccatttattatttagatgcagtcacagaatttgaagatgaaaagcatatcacagcgatgaaaaatttaacgatgaatgaagattttttccaaggatatttcccaggtgaaccaatcatgcccggcacactgattgttgaagcgttggcacaagcaggatcattattaattctgaaatcagcagcattcgaagggaagactgcgtatatcggcggcatcaataaagcacattttttggaattcgtacgtccaggcgataccttattcttgaattttgatattcaaaaggtcaaaggcccggtgggaactgccaaagcatgggcgacagtggaggataagactgtaacagaatgtgaatttacctttattgttggcgataaggaacaaaaaaaataatttaaaaaagaaccgaattctccttcgagaaaattcggttctttttgactacttcttaggttcttgcaaaaccttcacttcagtaactttgactggttctgtaggtgtagatttctctccggaaccattatctttcacttcgccgctagcgatcttatcgactacatccataccttcagtgacttgtccaaatacggtatactcgccatcaagttgtggcgcgccaccttttttataggcttcaatgattttctcaggatagtattgaatcgccaaaccatcgctttgatcttcgttattagttacaataaaaaactgactgccattgctgctgcgtgactctgcacgagccattgaaagggcaccacggatattataaagttgattggaatcttctgttttgaagccttttttccaaatactttctccgccagtgccatcaccttttggatcaccgccttgaatcataaagtctttgatcacgcgatgaaaaggagtgtctttgtagtacccatccttagcgtgcttcacaaaattttctactgcttttggtgcttgttctgggaaaagtttaatttttacgtttccttcagttgtaacaagttcaactaagtattcatcatcagtgactttgtcgttgagctgaggcagatccaatttatttaaatctacactggattctgttgtttttgttgcactttcttttgtatctttcgtagcagtatcgttgccacaagccgcaaatagcccaattgacaaggctaagcttgcaccgatcattatttttttgaattgcatataattctccttttcaaacttattatcattcctatgataacaaacttttaacatagttcctatgaaaaaaaggtgacttttacttcaaaaaattcatagaaacgagcataaaaaaaggagatcgaaaatgatctccttaaaaaactatttgaattttataggtttgcaaatttttctagcaaacgaatcatttggcaggtgaagccgtattcgttgtcataccaagcaactgtcttaactaattgatagtcgccggcagaagttacttctgtttgagttgggtcaaagattgatccttgtgttgttccgatgacgtcaccagatacgatttcacgatcatcgtagccgaatgatgggttgtcaactgtatgtttcttgatcgcttcgttcacttggtcagcagtaacttttgttttaagaactgaaaccaattctgtcaatgaaccgtcaacaacgggaacacgttgcgcatgtccttgtaattttccgttcaattctggaattaccaaaccaattgctttagcagcaccagttgaatgtgggatcgtattatcagcagctgaacgtgcagcacgtaagttaccgcccttaactggtccatctaataacatttgagttgaagtgtatgcatgaacggtagtcattgtaccaacttcgataccgaattcttcatttaagaagtaagccataggagctagacagtttgttgtacaagaaccagctgaaatgattttgtcatttgagtccaaagtgtcatcatttacgttgtatacaattgttttcatttgtccagcaggagctgagataaccacacgttttacacctgcgtcaatgtgtgcttgtgctttttcttctgaagtatagaagccagtacattcaagcacgatatctacgccattttcttttacccatgggattttacttgcatctggttcagcatatacacgagttttttcgccgtcaacaacgattgaatcttctgtcgcagtaactgtgccaggatatgtgccatgtgttgaatcaaattgtaataattgtgccaacattgtaggacttgttaagtcgttgattgctactacttcaatatcgtcagatacttctttaattcgacggaaagctaaacgaccaatacgtccaaatccattaatacctacttttactgtcataaccaaaagttcctccttttttatatcaagcaaagcttgacgccttacatttttattgtgcaacgcatcaatttttttgtcaaaagatattacctgagaaaatttttaacagaaaactactaaaaaaattgaaagcaccaatttttttttaagcttctatcaataagaatggactttttcagttaatctagctacaataaacgagactttgtttatgtggagattcattagtcaatagaataaagagataaggaggacacgaaaatgtccatgtttttagatcaagtaacgatcgatgtcaaagccggtaagggcggagatgggatggtcgcctttcgtcgtgaaaaatatgtgccagatggtgggccagctggaggtgacggcggacgtggcggcgatgtcatcttagtagtggatgaaggattgcgtacactgatggactttcgttacaatcgtcattttagagctactccaggcgaaaatggcatgagcaaaggaatgcatggtcgtggggctgaagatacttacgtcagcgttcccccaggcacaactgttcgtgatgctgatacgggagctttaattggtgatttaatcgaaaatggccaagaactgattgttgctcatggcggacgcggcggccgtggcaacacacgttttgcttcaccgagaaatcctgcgcctgagcttgctgaaaatggtgagcccggacaagaacgcaacattgaattagaattgaaggtcctagctgatgttggtttagtcggttttccatcagttggaaagtcaacgatcctgtcagtgatttcgtctgcacgtccgaaaattggcgcgtatcatttcactacgttagtacctaatttaggtatggtaacaaccagtgatggtcgcagttttgctgctgccgacttacccggcttgatcgagggtgcctcgcaaggcgttggcttaggaactcaatttctgcgacacattgagcgcacacgggttattttgcacgtgattgatatgagcggaatggaagggcgcgagccatacgaagactatcaagcaattaataaagagttaggttcacataatttgcgtttgttagagcgtccacaaattatcgttgctaataaaatggatatgccaaacgctgaagaaaacttgaagaagtttaaagatgctttgaagaaggataagaaagatgaatttgctgatgatattcctgtttttgcaatctcagcaattacaaagcagggattagataatttgctaaatgcgacggcggatctattagaagtgacaccagaattcttgttgtatgacgaagaagtagaagaggatactgtaaactacggcttccaatcgaatgaaccagaatttaccattacacgtgaacctgatgcaacttgggtacttagtggagaaaaattggaaaaactctttaagatgacgaactttgatcatgatgagacagtaatgcgctttgctcgtcaacttcgatcaatgggagtcgacgaagctttaagagctcgcggagccaaagatggtgatcttgttcgtatcgacaaatttgaatttgaatttgtagactaaaaataaaatcgtaattaattttaagttgtaccgcaatttattttgcggtatttttttgtatgataaaagcaaaaagaaagtgcttttaattgtaaataagtatgacttttctagaagaacaaagaaaatcgatgtcaaagatattgccatttattaatttatctttaagagaaattattgattgaagaattttgaattgtttaaaaaacaatgagagaacaattctatagaaaatgcgtgttatttttaatgttaataatcgatatttttttgtggttttaaaaacgaattaatattaaatattcttatccagctaaatcagttatgaaatattagttgagaaataaatgtgtaaagtaaaatgattaaatcttattttttcagcattaggaacaatatgggagatataaaagaatttattttgttaattagaatcaatttgaatgacagctgttatttgttctaaatttttatgaacgatcgaaaaaagtgttgtttaaaaatgataattgaattattttatctaggaaaagtttttttaacccaaaatttttatcaataattctaattgtgattactgaattataagcttttgggtagcgccgaagcctcagccggtgtaaactaaccttgtaacaagtaataattatattgttaattaataaaactttcctagccaactgttcggaaacttatttttaataataaaaaaggggaataatgtgatgcaagtattaattttaacgcacaatatcttagtggagagacctttagttgaaaagctacaacgcttaaatattgaagttttaagctcagcaaaattattaaccatgcttcaaacaaaacaagtaccattagaagtaatgagcttttttgatgttctaatcgttagcgaaacgatttccgatcaagaattaacaattattcttgaggaggtcggcgagaaattcacgatcattagagagactgatcggatgcctcaaaaagaagaaaaagcagattgggagtcaaaaggtgtcgatgaatggttacttgaagatgaaacacttagcgggttaagagagaagcttgctgagaaaacattgaaagaatctgtttattcaattggatttggtatgcgcggaaaacaagaggaagatgaacatgaaaaacgtccgattcctttatggaatttaacacgatcagaacgtgagatgttaagtacattgatttcgactaaagatgcaccgatcagccgaaatgatttggcagtcaaaatctggggtgacagcgattcagctagtcacatgacacgtttatcaacgattatcaaacatttaagaaacaagctaaaaattgacggtgttgaatatgacgtgattcgcacaaattggggcgaaggctatcagctgtctaaagtcttttttgatcactatattgttgatgaccgaattatggaagaaataaaaactggaaattaatttttattaaggctgtagacaaattcctttttcaggtatttgactatggtcttttttaatcgctttatctagtttacataactaaattatgatcatttaaactcattctattttccaaaaaattcatttcttgctacactaggattaaaagaataagggagcgaaaaataatggaaaaacgtgtaataattatgaacttcgatgtagaatcaaaagcttatgaagccttttcaaaggcaaagcgtcttcacatgaacaaatcttttaagggtgagcaaatggcggtcgtccatcattcgaacgacggagagcacaaatttgagattgaagactttttggattttactggtagcaataaaagttcaactggtggcttaatcggtatgatggtcggtattcttggtggtccggtggggattttattaggctggtttaccggtggcatgattggtgcgacacaggatgctaaggaagttcgagatgctactggagtttttgaatttttagtcgataagatcggtgaaggtgatactgcactacttttgattgctgaagaagaggacaatcgtccattaaaccagttaatcatgatggaattagggggcgaaatcactcgtcttgattatgaagaagtagaaaatgaagtgaaaaaggcacaagaaatggctaaaaaatcaaatgaatctgaagaagcagagaatgataaaaattcacaagagtaagctaaagcagagaaagatttcctttattagattgcactaagtaggactttcttctaaaataagattaatttgatagaaagtcagggaaattatggaattagaatttttaggaacaggtgcgggagtacctgcgaaacatcggaatgtcagcggtttggctttgaaattgttggatgaacgtaatgcaatctggctatttgattgcggagaaggaacccaaatgcagattttacgaacaaatattaaaccacgcaaaattgagaaaatatttatttctcatttgcatggtgatcatatctttggtttgcctggtttattaagcagtcgttcctttcaaggcggtgaagaacccattataatttatggtccagccggactagaaaattatgtgcgaacatctttgcaggttacgaaaactcgtttggcttatcctttacagtttgttgaactgagtgaaggtatcatttttaaggacaagcaatttacggttgaatgtatgttactggatcatgggattgacagttatggcttccgtgtgaaggaggcagatcatgaaggcatgcttcttgtagaaaaattggttgcactaggtattcctgctggtccaatatacggaaagttgaagcaaggtcaaaaggtaactctttcagacggacgggaaatcaacggacaagactttgtgggagaaagcaaaaagggaaggatcgtaacaatttttggtgatacacgattcacgagtaaatcaagtgaatttgctaaagatagcgatgtgatcgtccatgaaagtacttttaataaaaatgaagcaaaacttgcgcgagcttactttcattctacaactcatcaagcggcaactattgccaaagaagcgaaagcaaaaaaactgatgttgacacatatttctgcaagataccttgccaaagaagcgaaggaattggaagaagaggctcgcgatatctttccaaatacacaaattgccaaggatttcgatatcattgatattccattttcataaaaacacgcaatatattttacacagagagaaggaaactaaatggatttaaccgataaagtagttgtggtaactggaggttctgctggattaggtgaacaagtttgttatgaagcagctaaacgcggagcaattgttgtcacttgtgctcgccggattaatttgatcggacaggttagagaacgctgcagtgaattgagcggcaaagacgcctatgcttttcaactagacattgctgatccagatagcgtggaggcagtgatcgaaaaaatcgccgctgaagttggtgatgtggatgttttggtgaacaatgcaggatttggtttgtttgacaattttgtcgattttgacctagatgtagcaaaaaatatgtttgaagtcaacgttttagggattatgtattttacacaaaaaattgctatttcaatggttaataataagtctgggcatatttttaacgtggcatctatggcagcgaaaatggcaacgccaaaatcaacagtttattcggcaacaaaattcgcggtactgggtttttctaatgctttacggctagagcttcggcctgcaaatgtttatgttacgactattaatccgggaccaattgctacagaattcttcgacaaggctgacccaagcggcagttacttggaaaacttaggggggatcgttttagatccgcataaactagccaaaacgatcgtaaataaaatggggaaacccacccgcgagatcaatcgcccatttatcatggaaggggctagtattttttacggcttattccctcatattggagattttttagcgggcggtctgtttaataggaagtaggaaagcaaaatgaaaaagcaatggaaagtttttttaggattcattttagttttagtgattgtgatcttcgcactttccaatagccaagaagttccagtcaatttcttgatcaaaaaaatttatctttctctagttttagtgattatcggctcagccttgataggggctttggttgttttattaacctcaggagctactttctttcaacagcgaaaagaaatcaaacagttgaaagagtcgattcaaagctacgaagcgaataatgaacaaaaactagcggaagaaaaagcggcttttcaacgtgagcaagaaaatgaaatggcagtgctgaaagctaactacgaaagtcttttaaaggaaaaagatgatgcgttagctgcaatgcaaagttcgcagtccgaaaagaaggaaactcatccgattgattattacgattaagagaagaagaccttagttagaaaaaaactaaggtcttcttctctttcttgtctgtttcttttttgctatactaatacggttgggaagtgatagagtgaaaaaagcaaacttcgattggcaaattagaagcacgagtccgattgattctacctttaaagaagaaatggtgagtcagggatatagcgaaacatttgcagaacttttatggaatcgaaatatacatacaacagatgatttttcgcagttaataaaagcaaatattgatgatttgcatgatccatttctgatgcacgacatggacaaagcggtagaacgaattcaaaacgctatcatggaagggcaacggattttgatttacggcgactatgatgcagatggaattacgagcacttcgatcatgttagaaacattggagatgatcggagctgatgttcactatgtgttgccgaatcgatttattcatggttacggacctaataaagagctttttgccgagaaaataaatgaaggaattcaattaattattacagttgataatggcgttgcaggtaacgaggccattgatttcgcaaattcacagggtgctgatgtgattattacagaccaccatgagatgccgccagttttaccggatgcctattgtattgtccatccgcgacatccagatgggcattatccatttggagagttggccggtgcaggcgttgcctttaaattagcgactgctttattagaagaggtaccgttagagatgttagatctagtcacgattggaacagttgcagatttagtttcaatgactggagagaatcgaaatcttgtaaaactaggtttgcaggcaattaagcaaacacagcgtttgggattattagaattactgaagatcagcagtgttgatttgcaaaaggtggacgagacaagtattggtttcagtgttggaccaagattgaatgccattggacgcttaggtgatcctaatcctgctgtcgagttaatgacaacgtttgatgaagaggtcgcacatcagttagctgaaaaattgaaccagatcaacgatgagcgaaagcaaatcgtgcaggatataacttccgaagcaactgcgctagtgaatccagaggatgctgttcatttgattgcagcaaaagggtggaatcctggtgttttaggaatcgtagcaggaaatattttaaaacagacgggacacccgacaatcattttatctattgatgagaatggcgttgcaaagggttctggtcgaagtatcgaagctttagatttatttggtatgctaaatacgatgcgttctgaatttactcattttggaggacacgcagcagccataggattgactatgccagcagagaatatccctgttcttcgaaaaatgatgaatgactatatttctgctgagcagatcgatttaagcaaaggcacttccttattaattgatgaagttttacctttatctgcaattaatctgaaatttgttgaggaattaaaacagctagcgccttttggaacggataatccagcaccgcattttttaatcgaaggaaatatcaatctattcaagcgtatcggcagcgatcagcaacatgttaaattctcagtgaaaaatgaagatagtcaaatagatgcgattggctttggttttggtgacgagagcgaagaaattcaacagccagatactagatttgtcggtgacttagaaatcaatgaatggaacggacagaaaaaagtccaatttcgtttggtcgattttgcttctgatggcttacaggtaattgatcgccgggcgaaatatacctgggatcaaaatatcgagggtgatcgaattctttatttagcttttcaaacgaaaagtcagaaatattttacaaaagagttgcaaaaaacagtaactttatacgatccgacaattacctggtcagactatgatcagttagtcgtacttgattgtcctgatcaaaaagatttattgaaagaaattgcaaacgaaggaagctttacgcgaatttatttatatctgtacagtcctgacgaagcttatttgaatggattgcctaagcgcgatcaatttgcaaagctttatcaatttttccgaaaacaaccgcgagtagacattcgttttaagctgaaagttgtgtcgaattacttaagaatcccggaaaagttattagtattcatgattcacgtgttttctgagctaaaatttgttacaatagacgacggcgttttacaaatggtagaagctccacaaaatcgagcttttgaagaaagtgagatttatcaaaaacgcatagctcgaattgatagtgaagaatttttattaatgaatgatattcaaacaattagaaattggctgaaaggctaggaggaaataccgagatgaatttgaaagactatattgctagtatcccagattatccaaaagaagggattgttttccgtgatatttcaccacttatggcagatggtgaagcctatcgggaagcaacaaaacagattgttaattacgcgaaagaaaaacaaattgatatggttgttggaccggaagctcgaggctttatcgtaggatgtccagtggcatttgaactaggattaggttttgcacctgttcgaaaacctggcaaattgcctcgtgaagtaattgaggtagaatatgaaaaagaatacggaatggacacgttaacgattcatagcgatgcaatccaacctggtcagcgcgtattaattactgatgacctgttagcaactggcggaacaatcaaggcaacgatcgaactagttgaaaagctgggtggcattgtagttggttgtgctttcttaattgaattagaagaattacatggtcgcgataaaattcaagggtatgatatcttaactttgatggactattagaaaaatttgagttgaagaatttcttcaactcttttttgtgttcactttcaaatgtaacgcaaaaaaagctaccagatgagaatctagcagcttgtaaaataatttatgcggacttgtgatactgatgatcgtaagtcacgtagtagaaatcttcggctggttccttatagtattgttcttcttcgaactcttcttcatcgtagtgacgttcagcatagtgctgtgcatacttacgttcatcccacaacatgaaccagacaagaaacaaaccagagaaaataacaaccgtagctaaagaacctaacttaccgatcaataatcctagcaacaatacagcgataatcaaaccaaatcttcttactgctttcatcaataatcactcctatataaatacgcgaacgtgtgtttgtatatctattatacgaatgtttgttcgttttgtaaagaaaaaaataatcggaatgcaattccgattaataaatatggttacggtacaatccgacaacttttccaagaatagaaacattatcgtaaatcaatggtgctaactcatcattttcaggttgtaaacgaatgtgatcagcttcgcgataaaatctcttacaggttgcttcattctcatccgtcatagcgatcacaatctcaccattagtcgctgttgattgttttctgacaatgacgtgatcgccgtcataaattccagcgttgatcatactttctccgcgaatcgtcagcataaacaagctgccttcttcgcttgatagatctgggggaactggaaagaagtctgaagcttcttctactgctaaaataggttcaccagcggtaacgacccctaacataggtatgacttgcggagccaccccgattttttctaatccagtaatggttaattcaattgctcttggttttgttgggtcgcgttggatccatccttttttttctaatctggataaatgaccatgaactgtagaagtagatgaaagattcacagcctctcctatttctctaacagtgggtggataacctttatcttcaacgcgttcatgaatgaaacgtaaaacttctaattgttttgtttccgttctttttgccaatgcccgcaccttctttcgttttttttagtgtagcatagttattcaaacaaatcaaacaagcgttcgtatttcttggtactttcaacttatttttttttatgtataattagaaggggaaaagaggtgctcaagatgattaacgatgaaactatcgcacgcattaatgaactagctaaaaaaaagaagacagtcggattaacggacgctgaagctcatgagcagaaggtcttaagagaagaatacattgcttcgtttcgtagcggaatgcgccatcacatcgaaggaatgaaagtcgtcgatccaaaaggaaatgatgtcacgccagagaagttaaaaaagattcagaaagaaaagggtctgcacaatagaaaataaatcttttactggttaagtgattgaaatgttaaaataaatcggttacaatgaatctgtaattaaagtatttatgaccaaaaaggaggaactaatttgttcgacaaaatcgatcaactaggtgtaaacacaatcagaacgttaagtattgaagcaattcaaaaggcaaactcaggacatccaggtttaccaatgggtgcggctccaatggcttatgctttatggacgaagcatttgaatgtcaatccagcaacttcattaaattggcctaaccgtgaccgctttattttatcagcaggtcatggttcagcaatgttatacagcttgttgcacttagcaggctaccaagtgacgattgacgatttgaaaaacttccgtcaatgggaaagcaagacaccaggacatcctgaatatcagcatacagatggtgttgaagcgacttcaggtcctctaggtcaaggtatttcaacttctgttggtatggcgatggctgaagcacatttagcagccacttataatcgcgatagcttcaatgtaatggatcattatacttacgcattatgtggcgatggcgatttgatggaaggtgtttccgctgaagctagctctatggccggacacatgaaattgggtaaactaatcgttttatatgattcaaatgatatctctttagatggaccaacatcgaaagctttcactgaaaatgtcggtgcacggtacgaagcatatggttggcagcatatcttagttaaggatggcaatgatttagaggccatttctaaagcaattgatgaagcgaaagctgaaacagagaaaccatcattgatcgagattaaaacagtcattggttttggttcaccaaaagagggcacatcagcagttcacggtgctccaatcggaaaagatggaatcgatgctgcgaaagctgtttacggttgggaatatcctgatttcaccgtgcctgaagaagtggcgaaacggttcaaggaagaaatcaacgataaaggtgctaaaacagaagcaaaatgggatgcgatgttcgcaaactacgaaaaagcacatcctgaattagcaaaacaattcaaggcggcctttgccgacgaacttcctgcaaactgggaagaagctttaccagtttatgaagaaggtacagcacaagcaagccgtgtatcaagcaaagatgcgattcaagcaatcgccaaagctgttcctaatgtatggggcggttcagctgatttatctggttcaaacaatacaactatcgctgatgaaaaagaattccaacctggttcttatgaaggccgtaacatttggtttggtgtgcgtgaatttgcgatggctagcgccatgaatggaattcatttacatggcggaacacgcgtatatggaggaacattctttgtatttacagattacttacgtccagcagttcggatgtcagcgattcagaacttacctgtcatttacgtattgacacatgattcagtagctgttggtgaggatggtccaactcatgaaccaatcgaacaattagctagtgttcgctgcatgccgaatgtccaagtgattcgtccagcagacggcaatgaaacttctgctgcctggattcaagcattagaaacaaataacaaaccaacaatcttagtcttaagccgtcaaaacttgccagtcttaccaaatagtaaagaaatggctaaagaaggcgtttctaaaggtggttatgtgatttctaaagctgagtcagatacacccgaaggtatcctaatcgcaactggttctgaagtgaacttagctgttcaagcacaaaaagaattgaaagctcaaggaaaagatgtttctgttgtttctctcccaagctttgatctattcgaagctcaagatgaagtatataaagaatctgttttaccaaaagcagtgacaaaacgtgtagcgatcgaagcagcgtctccgtttggctgggaacgttacattgggtcagaaggtaagatgattggtattgatcacttcggcgcttctgcacctggcgattttgtgttagaacaattcgggttcactgttgataatgtagtaaatactttcaacgaattataataatcagattaattgaactgaggagaattttttcttctcagtttttttacgatttaatattagaaagcttcaattacataatcgggaaagtttacataatatttttatcgaatgaatctctaaacgcgtttacaaaatttcctacatcaaaagaaaagtgtgtgtttgtgagcaaaataatttagacagaatataaaatctgttatactgtccttgtgcaaaagattgcaaacaaataaagaatcaacgaaagtgggatgacaatgaaagtagtagtagtaggatgtacacatgccggtaccgcggctgttaaaaatattttaacaaatcacccagatgcagaggtgacagtctttgaacggaacgataacgtttctttcttatcttgtggaatcgctttatacgtgggtggagttgtcaaagatccagcaggtttattttattctaaccctgaggagcttgcctctttaggtgcaaaagtgaacatggaacacgatgtaacaaacattgatacagatacaaaaaaagtaacagcaaaagatttaaaaaccaatgaagaaaaaatcgttgattatgataaattagtcgtgacaacaggttcttggccgattattccgccaattaaaggaattgattctgagaatattcttttatgtaaaaactataatcaagcaaatgtcatcattgagcaagctaaagatgcgaaaaaagttgttgttgtcggcggcggttacattggaatcgaattagttgaagcattcgctgaatctggtaaagaggtaacattgattgatggattatcgcgaatcttgaataaatacttggatgaaccttttacaagtcgtttagaaaaagaactggttgatcgtggtgttacactagctctaggagaaaatgttgaagaatttgtggctgacgaaacgggtactgttaaaaaagtcgtgacagcaagtaaagaattcgaggctgacatggtaatcttatgtgtaggcttccgtccgaatacagaattgcttaaaggaaaagttgatatgttgccaagtggtgcaatcaaggtgaatgaatacatgcaatcaagcgatccagatattttctcagctggtgattcaacagttgttcactataatccaacaggtcaagatcaatatattccactagcaaccaatgctgtacgtcagggaatgttagttggtcaaaatttagtggaacaaaaaatgaagtatcgcggaacacaaggaacatcaggactttatttatttggctggacaatcggttcaactggattgacaaaagaaagtgctgccttaaatggaattgatgcgaacgtcacagtgatcgaggacaattatcgtccagagtttatgccgacaacggaaaaagtcttaatggaaatcgtctcagaaaaaggtaccaataagattttgggtgctcaattcctatcaaagtatgatatcactcaatcagccaacaccttatcagtagcgatccaaaatggaatgacgttggaagatttagctttacaagatttcttcttccagcctcattttgaccgtccgtggaattacttgaatatcttagcgcaagcggcgttagctgaagcagaatagagccaaaaacaggaagggagaccttcctgtttttttgcttattaagaactattcgctagtattggacttcctctttttttagtgtaaactaaaaaagtgaacggaggatttctaatgatttcattgaaagaatatttgtcaggcggagagacgacaatctccaatctgcttttgcaaaattatactaaacttgggctaaccactaatgagtttatgctatggttacaactttatgcctctcaccaagctggcgaagatttccctgatctgaccataattgctcaaaatatgggaagtacgaccgaaaaaatctatgcggctttgaatacgcttgttgaaaatgagtttgtctcccttgagacgacattagatgaacagggaagacatagcgatcattataatttactcccagcatttgaaaaattggatgtactgaaggaacaacaacgctttgaagcggaagaagaaaatgacttggcagcacaaaagaaaatgctgcgctcctttgagcaggaattcggacgccccttatcaccaattgaataccaaaaaattggttactggttaaatgatgaccattattcaccatcactgatcgaattggcattacaagaagccgtcttgaatcaagcctataatttcaaatatattgagacggtcttgcaaagctgggaaaagaaaaacattcgatctaaagctcaggtagaagaagaacaacgacgaagaaaacaaattctactgcaaaaagacgaagaccaaaagcaatctgaagaattgccgaaagtctctttatacaattggttagaaaggaaagatcccgatgcttagcaaagagaaaacgatggaagccttatcgcgaatgtacgacatgtttccagacgcagttggagagctccattctgattctcccttccaattattgattgcagtcattctaagcgctcaggcaacagatgtttcggtgaataaggcaacacctgcactttttaaggcttatcctacaccagaggcattagctcaagcgccgatagaagatattattgaaaaaatcaaaatgattggtttgtatcgtaataaggcgaagaatatcaaagcttgtgcacagatgctgctagataattacgatggcgtggtaccaaattctcgagaggagttaattaaattaccaggagttgggcgaaagacagcgaacgtggttcttggtgatgctttcggtgtacctgcaattgcggttgatactcatgttgaacgagtgaccaaacgtttaaggatttgcaaattgaacgcttctgtaactgaagtcgaagcgactttgatgcgtaaaataccgaaagatttatgggtcaaaagccatcataccttaattttctttgggcgctatcattgtaccgctcgatccccaaaatgtgaaatttgccctttattagatatgtgccaagaaggaaaagacagactaaaagccgctcgaaaatgatatgctccccctatataggacactgaaatataaagtggcttatatagggggagtttgtatgtctagaggaaaaatgaaattaagttcagaagaacggctagctcttgcagaaagagctttaagaaatgaagctagcataagcagcctggccaaagaagcacaagtcgatagcagtacgatagaaaggtggatcactctttatgagaatgagggacccacaggtttactccctacaaaaaggaatcaatcatactcaacagaattgaaactgaatgcggtccatgattatttagctggaacatatggtagcttaagagctgtcgccaagaaatacgggcttcgtaacaaaaaacaattagaagactggttaaagatatataatactcatagaaacttcaaatcagaaagtggtggaagtagaatgagtaaatccagaaaaacaacattgaatgaacgagttaaaattgtgcatgactgtattatcaacggtcgagactatgggaaaactgcgattcagtaccacgtctcttaccaacaagttcggaactgggtgttgaaatacgatgagatgggggaaaaaggcttagaagatcgacgagggcaacgagcgggaagtaaacctgccagaacacccgaagaagaaatgcgcgataaactggctcaacaagaacgacggatcaagttgcttgaaatggaaaatgacctgttaaaaaaagtcagcgagttagaaaggaggcgggatttgaattagttcgtcatacgtttgaataccaatcgatcaaagagctgcacgagacaaaaggctatccaattaacaccatgtgtaccctgctccatgtcacaagatcggcctattatcgttggttaaaaaatcccaaactgcctgaagtggtatttaatgaacagttggctgaccttgttcgttatatttatgaagcagacaacgataaaggatatcgcagaatctgtgaagatctcgtgaatgattatggctttcaagtgaatgacaagcgtattcttcgaatctgtcgcaaacttcaaatccaatcaaccatcaagcattcaggcaatagtatcactaaggcatccaagactccgtatcatattgcgaaaaatcatttgaatcgaaagttctatgcggatcaaccaaatcaaaaatggctaacagatgtgagtgaattcaagtattatgaaggggccgaagtgaagaaaatctatttgagcgctattcttgatctcgccgatcgtcgcattgtttcatttgtcatcagcgacaaaaatgacaataaattagtccttgataccttcgatcaagcagtcgccgccgaaccaaccgctcacccgctatttcatagcgatcgcggatttcaatatacaagtaaagttttttgcacaaagctaaagaaagcaaaaatgaagcagagtatgtctcgtgtcgcccattgtaccgataatggtccaatggaaggcttctggggaatgcttaaacgagaaaaatattatcggcgaaagtttatcagtagagaaagtctcgttgaaatgatcaaaaaatacatgaactattacaacaatggtcgctatcaacggtgtttgaagagtaagacaccgagccaagttcatcaagaattattaatggcagcttaatcactctccctcttggacaagcgaatagaataaatccgcttattcaagaaggagaccagtcgagcaaagttgaggttaaacaaagtaaaaaacataaaaactgcctaccgaaattcggtagacagtcgtcaaaataattttattctatttcattgtccacttgacggggagcccagcaaaatagatcgagcggctctttttgattaattattgttgttcattttgcacagctggggtctgagtaggcggctgactactagaggatggctgagatggttgcggatcggcagatgaagctggcgtcggacttgaactggcaggtggcacactgctgctggccggcggagtcactgtcgatgattcagagaaacttgattccgatgttatactgctgctggaactcgtggtttcgctgaaagtgctattgctgtaataagaactttgataggaatagctaggcgctggaactgatgaagcgcctttaacgtaaagctcatttccgattctaagaacatcatttggcataacccaatcttcatttgagacattttgcgatacataactcatcatttcacgataaacatcctgtgcgatattttcagattgtgaagttattggcgtcagtcgcttatcatagcctgcccaaattgataaagaataatggggagtatacccagtaaacattacatctggcgaaattgatccataatgtggaatctttgctaattcatcatccgtgtagttagacgttccagttttgccagcttggaaaaggttaggaatctgtgcataggttccggtaccctttgtaattacatcttttagcatatccgtaatcatataagctgtgtaaggttccattgctttttttcctttgttttcaaaggtttgttcagaaccatcttgatatttaattttattgatatagagtggttcattataggttccaccattcgcaaaggctgcataagctgctgccattttttctgtggaaatgccatatttcgttccatcttgtgtctcagtgttacttgagattgcattcgcttgttgtatttctttgtattgaatgcccaagtttttcaagaatttcgatacattttctggtcctacttcattgaaaagcttcacagctgggacatttcgagaattatacagagcctgacgcaacgtaatatttccttgataactattgtcccagttcttaactgctgtcttcgttccttcataataataaggttgatcgacgattcgttccccagtagatttttgcttatattctatagctggaccataatcggttattggtttaaccgttgaaccaaaatcacggtttgtacttactgcacgattcaatcctaagtagacgtcatcagcgatatttcgaccgccaatctgagcagtcactttaccagtctcactatctattagggtagcagctatttgtaaatcctcatcaggatattggacatattcatccccatttacaatcgaataaagatgattctgtgcgtcagtatccaaattcgtatagatatctaatccgtcagtataaacatttttgcccgttttgtcttcaacttgggcaatcacttctttgacgtagttgtcggcaactttacgttcctgattatctgtttctaaaggtaacaagccttgatcaatcggttcattgatcgccgcgtcataatccttttgagagattttcttattattaagcatagtatagagcactgtatcacgacgctcttttgcagcatctggatgtttatagggatcataagaattaggtgcttgtggcatacccgccaataatgccgtttgcgcgatagtcaggtgctgtaattctttaccgaaatatgtttcagcagctgtctccatcccatacaagccatttgccatataaaccttattgatataataggtcaatatttcttgtttcgagtgttttttctctagctggatagccaaccaagcttcctgtgctttacgtcgcaacgttttatcggcttcttcagtagttgttgaaaagaaggaaagcttaaccagttgttgggttaaggtactaccaccttgaagaccacctttgttggttagattatgcaaggccgatccggcgattcggacaggatccacaccgttgtgcttgaaaaaacgacgatcttcgacggaaacaatcgcatcatctaattcttgcggaattttatttgcgctgactttttctcgcttttcggcgccaagatcttcaaaaatattaccatcactgtcaaaaagcttagaagagaccgttgcttctaattttttttcacttaaagcaggtgcatcttttacatagtagaaaaagatgccgataccagtgagtaatgcgacgcaaagcagcccaacgattgcgatcgcaattttcagcccaatatgacgattctttttatttttttgtttaggttcctttccttgagaggtccgcttttttttctgcgaacgtgagggattagccatttgattaactccttttttcaagatattgttccaccgctgttaaataagggattcttggagcaatttgcggtgtgatctcgataccaactgtttctatgtgttctagcggtattgattttttgccattttcttgactctgccaatagtttaccagttcttcagcagaaagaaaaaagcaacgattcaagcttgaaaaccaaagtagaacaaaacaaatcgccctttgcttcagacattgctgcatatgagtgatctgatgctgatgaaaattctttagcgggaaagagcgtttgttttttgtttcctttgcttcaaaatctaaatagtatccttgataaacgccattataatcagttgtggaaggttgtctgaaataggcttccttaataactgcggcactccgttttggataatcgaccttaacaatctgaagtggcgttggctttttatggacaactgccttatcatgggttaagtagtattcattgctttgattgattgcttcttcaaagcgcataccgcgattagcaaacgttgtttctttttgtaatgaacgttctcgtggattcttttgtgaaaagagctgaccattggggtagtgaaaggccatatttcatcacactcctgtttgctattatagcaaatttttttgaaagatattttatttttaagtgaaagtaaggaaaatgcaatgaatgaaacaatacagcgagtatacgtaacaggatatcagagctatgagctaggaatcttcagtgaacaggaccctcgtgtgcaagtcattaagaatgttttaaaaaaagaattgacggctttgatcgaaaatggtcttcagtgggtaatgatcagcggtagtcttggtacagagatttggacagggcaggtagtcaatgaattgaagcaagattatcctgaaataaaattagcgattatttttccatttgaagcgtttggaaataactggaaagaacataatcaattacttttgagcgagcttgtacaaaccgcggattacgtggattcggtcagtcatcaaccctatcagaatcctcaacaatttaaaaatcatgtaaattttttactgcagcacactgaggcagcattgttagtatatgataatgagtatcctggtaaaagcaaattctttttagctgatgtagaaaaatttcaagaacaaaatccctacgatttgcttacaattacgatggatgatttagaaaattcctcagacttcggggatagtgtttgatttccttaagtttatcagctagaatatataggaaagtaaattaagataagagctaatgaggtggaaaaatggcgaatgtaatctatactcctaatgatattttggagcaagaatttaaaacaaaaatgcgtggttatgatccaattgaggtcgacgaatttttggacaatgtaattaaagattatgaagcttataacaaagaattattaacactaagagaagaaaatgatcgcttgaaagcaaaagttgaacaactatccaaagctcagccagctccttcacgtgtgaaagaagcagcgcctaaaagttcagctgttacaaactttgatatcttgaagcgtttatccaatcttgaaagagaagtgtttggcaaaaagcttgatcaacaggcatcaaaccaaacagctccttctgattttggtcaaagctatactcaagatgagagcgatattgagaaaactcgtcaattttaaatttgaatgatgcaatttttgggtgatcgcggtttgcactaagcaggctgaggaaagtccatgctcgcacagactgagatgtctgtagtgttcgtgcttagcgaaaccataagctaaggtacttcttttgaagtaacggcagaaaaaaaggctaaggagtaatctatgcctgagtattcttgaaagtgccacagtgacgaagcattttgagaaatcaaaatggtggaacgcggtaaacccctcgagcgagcaacccaaactatggtaggggcgctttttctaaggaaatgaacgatgaaagagacggcatttatgtcggagatagatgattgccacgatgatcacacttccctgagttggtcgtcgtacaaaacatggcttacagaaaattgcagcaattcagggtgtgccttccaactttgcgttgtgaaggtctttttttgccagtttttcttcctgctttagcaggttagaaaaatggtatgcgaaatgaagataaaactaattttttcgctttttgaaaaaattaatcccttagtacgaattagctgccagtccaacttttcgcagagctcaaagttggactggtaaaagaaagcttaaaactttatatcgacacgcgtaatttagttggatggtatgcgtacgaaaataaaacttttttcggtctttgaaaaaagcaatccattgaattgagctagctgcgagttcctcttcatacttagttgaatcgtatgcgaaacgagaataaaacctattttttttagtttttgaaaaaaattgatacgattgatacgttagtttaaaaggttaattcgtcgtacatcggaaaaaattattactactattatataaaggagcaattatggagaaagagtataatttaattgccactgccgctgcgggtatcgaagcgttagtaggtaaagagttacgtaatttaggcatcgattgccaagtcgaaaatggacgggcacggtttaaaggaaatttagaaacaatcgctaccgcaaatttgtggctgcgaactgctgatcgcgtgaaaatcattgtcggggagtttgacgcgtttacgtttgacgaattatttgaaaaggttaaggcgattgcttgggaggattatctgccaatggatgctgaattcccagtggcaggacgttcaatcaaatcaaaattgtacagtgtccctgattgccaatcaatcacgaaaaaggcaatcgttgaacgtctacgagaagtctaccatcgtccagcgcgagtgcctctaccagaaaccggtgcgctatttcagctagaggttgctttactaaaggatcatgtcgtattaactttagatacaactgggccaagcttatttaaacgtggctatcgattagaaaaaggtggcgctccattaaaagaaaatatggcggcggcattagtaatgttgacaaattggcgaaaggatcgtcctttttatgatccggtttgcggatcagggactttatgtattgaagctgcgttgataggtcacaacattgcgcctggattcaatcgtgattttgcctgtgaagcctgggattggtttgatgccgctgtctttgataaagttcgttctgtagcggatgaagcagcggattatgatattgagttagatattgctggttctgacatcaatggtcggatgattgagattgctcaagcaaatgctgaagaaatcggattaggtgattcgattcaatttaaacagcaggcggttaaagattttaaaacagagaaagagtacggtgtgattgttgcaaatccgccatacggagaacgtttatgcgaagaagaacaggttcgtgtattgtatcgtgaaatgggagaggttttccgcccattgaaaacctggagtaaatacattttgaccagtgatttagcatttgaggaattttacggggctaaagcaacaaagaaaaggaaattgtataatggcgctataagaacggatctgtttcaatattggggcgaacgccctccaagaaagccgcgtaatgatgccgaataaaatagaagcaattcgtaagtatgccaaagagaaacttggtgctgatcgcagtggacatgatttttatcatgtccagcgcgtagctaaaatcgctaagaatttggctgaacaagaaggcgttacagatacgttgatgattgaaaccgctagttatttacatgatgtgattgacgataaggtcgttgaagatgtgacaagggcgcaagaagatcttaaaaggtttttaaaagaacttagtttttctgtcgaagaaatacaggaaatttttaaaatcattgaaaacatttccttttctaaagaaatagaaaacggaaaagctgaactaactttagttggacagatcgtgcaagacgcggaccggattgatgcacttggcgcaataggcattttacgaactgcttattatggcggccatacgcaaagtccattatatgatcctaacactgcgccgcaagagtttaaaagcaaacaagaatatcgcaaaaaaagtacagtaatcaatcatttttatgaaaaattgtttaagctgcctgctacaatgaacacgcaagctggaaaaaaagaagcacaaaagcgcatgcattttatggaagaatttttaaaaagattttacgctgagtgggatttatcataaatgagagatgaaaatagtaaattaaaaataaaaatatcctttagttgagacgttttatttccagtgaacttctttttctcctataatgttctttggttaggaggaactctaaatgctacatcgtgaaatattgagtcccgaagaagttttagaaagaatgcccaacttatctgagggattattcgctattcgttgcaaacttacaaataagacctatcaaattattttatataaatatcaagaggattattttttaatagaaaatccagcactgattagtgtcttgctgaaaaaggatcaaagcttttttggaacaccagagcaacttttaaatgaaattgagcggtcatttgaggaaaatcattatcagcctgcatcaaaagagtgggtcaacttagatttgaataccttgaaacgtttaactaatgtgaaaattaaattttttgatttggaagaataacaggataagcctgttattctttttttctaaactgacgaaaaaggtaatacacattaataatggtgagaatcgcacctagtacaaaaggaactatcaggcgcccttgactgtaaccaaagttcttttgaaaactttctgaagacgtcaaagcaacaaccgtttgactgtagttatacacctgatagctaaaagtcgttaaaaaaactgagatcaaagttaacgcaaagcgacggtaatcactatttttcatttttttgacaaaaaagaaaattatataaacgaccatcaaagccgctggaacaccaaaagcaaaaagcgggttaagcatttttttacctccttaaaaatctgatataatttttattttgtgttcattttaccacaatttagaaaaaatccctgatgattagaaattgaaggaataaggatttttcgacaatattctttttttagttaacaggttttcaaattactaaattgctactatcagatttgtcatcagcggtaaaaatggtaactactataaaatagagacttttccttcgcatttagaaagaagatattttaaactgagctatatgaggctgttgctcttattgcagctgaatagttatgaacgtaaattgaacaaaggagctatctatgaacagttacacgttaccgattaaagtggcggtgcttacttttccttttttggcgatgtttatcactgcacctattttaatttattattatcgaaaatatggagaactaggcaagctgagaagtctgatcttgtattcgtttgttttttacttgttatgcgcatattatttagtgatcttgccgttacctgaagtcagtacggtagcacagatgactggtccgcgttatgaacttcatttatttcaatcttggcataatttcatgaatcaaacggtactgcaattgaataacccaagcacctatttgccagcaatgagacaaagcgtctttttggaacctgtgtttaatatttttctactttttccatttggcgtatattgtcgttattattttaaattttcattttggaaaactattttggtaagcttctgcttatcgctattttttgagctaacacaattaagtggtctgtattttatttatccgcgtccttatcgattatttgatgttaatgacttattccataatacattaggaggaatactgggctttgcttgtgcgccactattcactttctttttaccaacacgaagtgaactggactcagaatcattggagaaaggacggcaggttacaataataagacgttttgtcgcactggcgatcgattggtttatcattggtttgtttagtccaataattaattatctatcaaatgtattaccacctaaagccggtgaaatcttaagtaatacgatgccggtgttcatcattgaagtaatcgtttattttatgctaatcaattatctcttaaacggtcaaaccattggaaaaaaggttgttcgtattcaagttatcgaagatggacacaagcatattcgtttgagccgactgatcctgcggtattctgcgctttactttcttttcttcgggctgctgcaaatttttcaatacacaatgacacatttaatttccgtaaatcacacgctctttatcgcttatgcgacattaggattgttaagtttaggaattttacttttatttctattcaacttattgtatgctctcataagaagaaaaacccgcctattccatgataaagcgagtcacacgtatacgattagtacgttaaagaaagaggtataacatgcgaacttttgaatcattcaatttccagccgtttattcttgaagccatcaaggataagggttttactgaaccaacagcggttcaagaaaaattaattcctttaattaaaaaagggaaaaatgttgtcggacagtcacaaacaggttcaggaaaaacccatacgtttttgctgccattaatgaataagatcgacgccgctaaagatgaggttcaaattgtcatcacagcgccaagccgcgaactagcgacgcaaatttatcaagccgccattcaaattgcaaaattttcaccaaatgaaatccgcgtaaccaattttgtgggcggaactgacaagcaacggcaaatcgacaaattagcgacgcatcaaccacatgtcgctatcggaaccccaggtcgtatcttagatatgatgaatgagcaagcattaaaagtccatacggcagagtattttgtggtcgacgaagcggatatgactttggatatgggatttttagctgaagtcgatcaaattgctggtcgtttaccgaagcatttacaaatgttggtcttctcagcaacgattccagaaaaattacgtcccttcctattaaaatacatggaaaatcctgtgattgaagaaattaagtcaaaagcagtaatttccgatacgatcgaaaattggctcatttctactaaaggacaggacaagaatcgtttgatttatcaattattgacgattggtcatccatatttagcgattgttttcgccaatacgaaacagcatgtcgatgagatcagtgattatttgaaatcacaagggttaaaagtcgcgaagattcacggggatatttcaccccgagagcggaagcgtgtaatgcgccaagtacaaaatctagattatcaatatgttgtcgcaacagacttggctgctcgaggaattgacattgaaggggtttctcatgttattaacgcagagattccccaagatttggatttctttattcatcgtgtgggcagaacaggtcggaacggcttgtctggcacggcgattactttgtatggtccaagcgatgagaacgatgttaatttaattgaaaatctcggcgtgactttccaaccaaaagagatcaaaaatggggaaatcatcgatacttatgatcgtaatcgtcgaaagaaacgcgaaaaatcaaaagatgagctagatccaactctaattggtttggttaaaaaatcaaagaaaaaaattaagcctggctacaagaaaaaaattgatcgcgcaatttctgaatcgaataaacaaaaacgtcgtgtagctcgtcgtcaagaagaacgtggcgcacgtaagaataaaaagcgttcaaactcttaaaactttagagaaatgactattaaaagaacttgtatctgttaatccgatacaagttctttttgcattttgacacaaggaataccgtcttcttcaaagatatccgaaacaacgcgatagccgattttctcgtagaaagcctgcgcactaagttcggccgaaagaacagacgtctgacagccttcgaaaaatgcctgtgactcaatccgagctagaagttttgtccctaaaccttgattgcgataatcaggatggacgcatagacggtcaggattcaacgtcgattcatctaatttttgatagcgtacagtggcgatggggatttgctcatcaaagaaaacgagatattgacgatccactgtatccaattgatcaaactccaattcgggcaagatattttgttccaaaacaaaaacctggtagcgtaaaaaaaaggcagcagcctgcaattctggtgaagctccaaaaatttccttcatctttttcctcatttctttgtgataatggtataattctaacatatgagtgttggaggaggcagaaagatttatgaacttattagatcaattagactggtcctattggaagcgactgaatccaaaagaaaaacgtaccttgttaagccagcttttgcttcattttgtcaatccattaatgaagatttcagatattgaattaaaggattttgatttgtacggtatcaaatgtcagacgtttcagttgctgattgatgaagaggaatttgtctttatcccaggaaataaagatgccattttaggctggaacttaggaacaaaaggtctgtcattgttggaaaccgcaccgaactctccagaaataatgatcccagaagaattacgcggacaatataacttttttgatgttgattctttaggagaactaataaatgataaaacaacaagtttgcgtaaagtacaaatcccgccaatgtttgttcagcgtcatgctttaccagcgggaacaaactatttgggagtttatgattcggtaactgggagtttttcaggagaagcagatcaattttctacctatgaagaggaaattaaaaatgtcttgtcaccaaatttgacgccggaagaaagcatgacttggtcttttcctaagaacgtattaaaagaaggacgttggtatattgaaatgatccctcattcagacagctactatgtgtttagtcatgaagagcatacctacaccagtctacgaaagaaaattcgcaagaaaaattttgatttattaacagaagatcagtgggaatacgttaatggtgcaggcagccgccgtctatttcggtggggcaatgatctaaatgtcactgatccttatcgcggcaagaacgttcggaagatgatggaacaagagaatatgttcggcttattctttgatacctcaatggaacgctttgaaattaccgaagatcccggtgtattaaaactgacgaataagaagaatcctgttggaattccaattgttgatttcctgccgctatctagttattacagcaatacgacaacaatgatgcatgaggagattctctcaccaagtaattatttgtatcgtaaagcaattctaatcaagatctagtttgacttttgacaaacttttttctatactcttaaaaggataaggtttattattttcgcctccacagaaagtgcacgattgctgaaagctgcacgttgcgtgtaatgaattgctcccgacattttttgattgaaaaatcaacgctgctcagcgttaacgagctgaagaggtaatgatcaaactatcattgcaatcaaggtggtaccgcgagttttcgtccttgactgcagtggtagtttttattttttgagaaaagaggagaacagatgaaaaaattatcaagcgcacaggtgcgccaaatgtttttagatttctttaaaaccaagaatcatatgattgaaccgagtgcgtcattagtaccggtgaacgatcctaccttgctatggatcaattcaggggttgcgacgatgaagaaatacttcgacggcagtgtcgtgccagaaaatccacgaattgccaatgcacaaaagtctattcgtacaaatgatattgaaaatgtaggtaaaactgcgcgtcatcatacgatgtttgaaatgctaggaaatttttcgatcggtgattatttcaaagtggaagccattgaatgggcttgggaattcttaacttcacctgactggatcggctttgatccagataaattgtatgtaacggtttatcctgaagataaagaagcaaaacggatctggttagaagaagtcggaattccagcagatcacgtggttgaaattgaagacaacttctgggatttgggcgctggtccaagcggtcccgactcagaaattttctatgaccgcggcgaagccttcaacgatttagctgaagacgatccagaaaattatcctggcggcgaaaatgaacgctatctagaaatttggaatctggtattctcagaatttaaccatacgccacaggatacttatgaaccattgcctcatcaaaatattgatacagggatgggattagaacggatggtttccatcatccaagatgcccctaccaacttcgaaactgatttattcttaccaatcattggtaaagtagaggagttaagcgacaaaaaatatggtgctgataagcaattggatatttctttcaaggttatcgcggatcatatccgttctttagcctttgcgattggtgacggcgcattaccttcaaatgaaggccgaggctatgttttgcgtcgtttattacgtcgtgcggtcatgcacggtaagaaattaggtattgatcaagcgttcttgtacaagctggttcctgttgtcggcgaaatcatggtgagctattatccagaagtgaagcaacaggaggctttcattgaaaaagtcgttcggacagaagaagaacgtttccatgaaaccatcaatgacggtttatcgatgctgaacgatgtgttagctgaattaaaagcgaaaaatgaaaccacgttagatggaaaagttattttcaaattgtacgatacgtttggtttccctgtagaattaacggaagaagtcgcagaagatgaaggcttgaaggtcgatcatgaaggctttgaagtagaaatgcaggcgcaaaaagaacgtgcccgggctgctcgtacaacagaaaaatcaatgggcgttcaaacggctttattgggtgatatcaaagtagcaagcaagtttgtcggctatgaacatttggaaagtgaaagtgaattgcttgttatcctgaaagatgatgccatcgttgatatggttggagaaggcgaagcgcgtttgatttttgcggaaacaccattttatgctgaaatgggcggacaaatcgccgataaaggaattattgttgatagcgcaggtaaaattatcgctaatattaccgatgtccaaaaggcaccaaatggccaagctttgcacacggttgaaatccttggatcattaaaagaaggcgaaaaatactttttgcaagtcaatgccgcttaccgcaataagatcatcaaaaatcatacagcgactcatgttctacacaaagccttgaaggaagtgctaggcgatcatgcaaaccaagccggttcattagtgacggacaagcatttacgttttgactttacacatttcggtcaagtgacagcagttgaactaaaagaaatggaaaaaatcgtcaaccaaaaaatctgggaagctattcctgtggtaacaatcgaaaccgatattgacacagcgaaaaatatgggcgcaatggccttgttcggtgaaaaatacggacatgatgtacgtgtagtaaacatcggcgactggtcgatcgagctatgcggaggtacgcatgtagcgaatacagaagatattggcttattcaagattgtctctgaatcaggtatcggtgccggcgtacgtcggatcgaagcgttgaccggcaaagaagcctatgaagctttccgtgatgaagaagaacaattaatgcaagtggcacaaatcgtgaaatcaccacaaatcaaagaagttgttagcaaaaccgagcaattgcaacagcaattacgtgagctgcaaaaagaaaatgaacaactagcgacaaaactagcgaaccaacaagcaggcgacgtcttcaaggatgtcaaagaaatcaacggcacgaccgtgattactgctcaggttaacgtaaaagatatgaatcaattgcgtcaactagcggatcaatggaagcaaaaagctttgtctgatgtgttggttcttggaaccgttcaaggggagaaagtgaatctactagcagccatgagtccagcagccaatgaaaaaggcttgaaggctggcgatctgatcaaagcgatcgcgccaaaagtcggcggcggcggcggtggacgtccagacatggctcaagccggtgggaaaaatccagcaggtctagctgatgcattagcagaagtggccaactggttagcataatttccaattaaaggacagcatctttgtgacgctgtcctttttttatgagaatatgactattccatagcaactttcttttattactaaggcggtttaggtataattcaaatgagagaattatttttctgaaaagaggggaccatttgggaattattgagcaaattattttatttatttttattgtcaacttagtgggggcaatcattactgtttttcgtaaaccgcggaatatcacgacaatttgggcctggcttttgaccttgatctttttgccagtcatcggatttttaatttatgccttttgcggtcgtggtattgacggcgaaaccatgtatcttttcgagcaagatgacgaggctcgagttaaagagattaatgaaattatccagcaagacaatcgtcatgtcgaccacaacgaaccagatcaattgtatccagcagcgacagccatggtgaaatattttaaaaatttggatgaatcaccgttggcaatccgtaacgagttagaatttttcctagatggaacggcgaaatttgaacgcttatttgaggatttgcgcaatgcgcaaagtacgattcacgtcgaatattacgccttctttaatgaccgcatcggtaatcgcttcatgcggattttggaggaaaaggcagctcaaggcgtggaagtacgaatgatctatgatccgtggggggcaccaaaaacaaataaaagctttttttcaaccttgattaaaaatggcggcaaggtggcgccttttattacctcaagaaacattttggctaagacacgcttaaattatcatttgcatcgaaaaattgttgtggtagatggtcagattagttggacaggcggttttaatgtcggagatcagtatctcggggaatctaaacgctttggaagatggcgcgatactcacggtcggatcgagggaacagctagtttcacgttgcaggaaatttttattcgcgattggaatgcttctgtcacgaacaaagccgatcggatgagttatttaccagaatattttgttttaccgcaaaagcagattgaaaaaggtgtaccaatgcaaatcgtggccgatggtcctgattccagcgaacagattattaaagacggctttgttcgcatgatcttagtagctgaaaaaagtgtctggattcaaagtccgtatcttgtaccagatgagaccatgatttctgctatcttaattgcagtacgatcaggaattgatgtaagaatcatgattccaaatatgccagaccatccattcatttaccgagctactcaatattatgctaattatttccatcaacgaggggtaaaaatttaccattacgcagacggctttttacattccaaaacgattgtcgttgatgatgagctggctagtttcggctcaaccaatcaagatatccgcagctatgagttaaacttcgaggtcagcagcttcatctatgatccagcgattgcacagctattccgaactatctttgaagaggatatgaaggaatgtattctgttaacagatgaaataatcgccaatcaatctcactggttgaatttcaaacagcgcttctcacgtttattatcacctgttttatagttattttcgcaaaccttggcgggcaagattgtccgcccctttattttttgcttctggaatccattgtagaatcagcaggggaaattgcggcgctaattcattaaactctgataaatatggctgaaagagcttgttttttgtttgtccttggtctaaaatttttattgcagttttactatcagaataaagtaaaatcgtttgatcgttcagcttttggtcgatcaaataggttagtgcatggagaatcactgctaattctgcttgatgattgttggtttcaggcagtgagattgcaagctgttcttgcttttcagaaataataagaatgccgccgccgctcttttgagtattcgtagccgcatcagtataaacttttaacataatgatcatccttttttagaagagtaggagtatatgaatgaagacaaaacgctatttttggcaaccagagctgtcaatcagcattatttattggtcgttgacctttattgttcttttttatggtttgattctgaccttagagaaaacacggccttatttacagggtaatattgtgatcggcatcgccattttatttgctgttgtcggccttcatcgctatttgaacattgacgaaaccggtataagtgtccgatacgcaagagtttggcgccgtgagactcttttacgggagcatatcgattatttaacaccgtgtaaagacggggtgattatccagcgaaaaggacttagcggagcagctttccattttgctatgcgtaaaaaaagaaaagaagcctttataaaagactttataacgttttatccagaaattgaaatcagagaaataaacgaaaagatcagtcatgactgatcttttcgtttatttcttttttacatgagctgcttgcatcccgcgagcaccctccacaattacaaaatcaacctcgtcacccggatccaagcttttgaatccatcttcctcaatcgcggtgaagtgaacaaaaacttcttgattttcatcataggcaataaaaccgtacccttttttttcatcaaaccatttaacaatgccactattcattacgcaacacccctttgcaattgctggttttattatacgtgaaggaaacaaaaattgcgaatcaatacgtttgataattctaagtggtgtttttctttaaaaaattcgttataataaaaaggaacgaataaaaaagtgtatttttctgagtaacgttcgggaaagggagtttttatgaaaactgatatcgaaatatctcaagcgacgactttagcaccaattacggaggtcgcagaaaaaatcaacttatcttttgatgatttggaattgcatggcaaatacaaagcaaaaattgagtttgatgctttagaacgaatgaaagaaaatccagaaggcaaattgattcttgtcacatcaatcaatccaacgccggcaggggaaggaaaatcaactgttacgattggattaggcgatgctttaaataaaataggcaagaagactgtgatcgctcttcgtgagccttctttaggaccagtgatgggtatcaaaggcggcgcaactggtggaggctacgcacaggtcttacctatggaagatattaatctgcactttactggcgatatgcacgcgatcacaacggcaaataatgcgttatcagctttactggataatcatatccatcaaggaaatcaattaaacatcgatgcccggcgcgtgatttggaaacgggttgttgatctgaatgaccgtgagttgcgccatatcactgttggcttgggcggtccgatcaatggagttccccgcgaagacggctttgatattactgttgccagtgaaattatggcaattttatgtttagcaacagatattgaagacttgaagcagcgcttatcaaatatcgttgttgcctatacctttgatcgtgagcccgtaacagtcggcgatttgaaggtggaaggagcactagcgcttgttcttaaagacgcaatcaaacctaatttggttcaaaccatttatcaaacccctgcgtttgtgcatggcggaccatttgcgaatatcgctcatggctgtaatagtattttagcaactcgagctgctctgcactgcggtgattatgtggtcacagaagcgggctttggtgcggatcttggcggggaaaaattcttggatattaaagttcctagtttaggaaaagctcccgacgctgtagtgatcgttgcaactatcagagcactgaagatgcatggcggaatggctaaagctgatttaagtatggaaaatcttgatgcattgaaaaacggcttcagcaatttagccaagcatattcgtaatatgcgcaaatatggattaccagtagttgttgctatcaacgaatttatcagtgacactgacaaggaaattacactattaaaagaactttgcgaacaagaagatgtgaaggtcgagttggctagcgtctgggagaaaggacctgacggcggcatcgatttagcaaagacagttgttgagacgattgcaaatgaaaaaaatcatttccattcaatctttaccagagaacatgatgacttaactgaaaaagttgaaacgatcgttcgcgagatttatggcgggaatgaagttatctatagtaaaaaagcacagcagcaattggccagcttcaagaaatatggatgggatcgtttgcctatttgcatggcgaagacacagtattcattatcagacgacccaagtaaattaggggctccaattgattttgatgtgacgatccgcgaatttgtaccgaagattggcgcaggatttgtcgtagcgctgactggtgacgtcatgacgatgccgggattacctaaaaagcctgccgctttaaatatggatgttgatgaaaagggcaatgctatcggcttgttctagcatgacaaatggagcaaacactcgtgaaagcgggagtttgctccatttttgtatattcaaaagcagattttgcatatttttactaaaacatgcaaaataatttataaaaaaccattgacttgtataaatactacacgtataatcgtcagaaatagcagctttctaatcgtattattattcaattccaagaatatcagcttcgcttttcgcggtttatatagtgaacaaaaaatcaggcacaccaaaagttcaccaagctaatggaataatatacggcttgaacatcagaagaaaaaggagggattaatttgaaagtttcgattatcggagtgacaggctacagtgggatcgagctggtccgaatactattgcagcatcctaacgtagagattagttctattcacagtcattcgcaaaatggcaaagatattgatgagtatttgccgcatttaaatcgattgttgaaccttcctctggaaccaattgattccacaaaaatcatggagcagtcagatttagtttttttcgctacaccgtcaggtatctctaaagagatcgccacaacttttgtagaggcagattttccagttattgacctttcaggtgattttcgattaaaaacagatgggcaatacgaaaaatggtataaaaattcaagtgcaccctttgaaatattacaaaacgctcattacggattagctgatttttatgcagaacctacgtcaaaattaatcgctaatcctggatgctatgctacgggaacacttttatctttggcaccgctggttcagcaagaaattatcgaatgcgattcaattatcgttgatgcaaaatctggtttatcaggcgcaggcaagaatttatcggagtctagtcattttgttaacagtaatgaaaatatgacgttgtacaaaatgaacagccaccagcacattccagaaatcatgcagcaattaaaaaaatggaacgaaaacattccagcaatccaattttcgacttccttaattccagtgactcgcggcattttcattacaacctatgctcgcagcaaggaaaaactgacacaagaaaaggttttaaatttatttcaaaccttctatcaagaaaaaccatttatccgagttcaagatcaagatgtttacccaaacttacatcagatcgtcggttcgaatttctgtgatattggagtagcttacaatgaagtgaccaatatcgttactgttgttacagttttggataatttagtaaagggcgcagctggtcaagccgttcataatctaaatcatctagcaggttggccagaaactactggactaaatctagtaccaatttatccataaaaaaatgccggagtgtgaagaatatgcaaatcatagatggaacgattgccagtcccaaaggcttttatgccactggcctacatgcaggattaaaaaaagagaagaaagatctaggagtcatttattcagaagttcctgccaatgctgcggcagtatatacgacaaatcaagtaaaggcagcaccgatttttgttacaaaagaggcaatgaaggataccaccattcaggcagtggtagtcaactcaggtatcgccaatgcctgcacgggaaaactaggattggaaaatgcaaaagagatgcaggcgataacagggacacatttgaatatcccgcaagaaagcgtggctgttgcttcaaccggtgtgattggtaaacaactgccaatggaaatcatcgaagcaggaatcagcaatatcgatctggaaaagccagaaccctatgcttttcatgaagccattttaacaactgacacagcgacaaaggaaatcgtcattactgaagaaatcaatggtcagcaggtaacaatggcgggtgtagccaaaggatcagggatgattcatcctaatatggcgacgatgctggcattcattacaaccgatgctcaaatttcagaagaattgctgcaggaaattttagcagataaaactgaaacgaccttcaatcagatcactgtagatggggatacatccaccaacgatatggtgttagtcttagccaatggcttggcagaaaatccagtgatcgaaaaaaattccaaagcgtttgaacaattcgtggcgatgtttcagctagttagtgaaacgctagcaaagaagattgccaaagacggcgaaggagccactaaattgatcgaagcacaagtggtcggagcgctcaacggaagtgaagcccgtttagtcgctaaaaaagtcgtcggctccagtttagtaaaaaccgcaatgtttggagaagatcctaattggggacgaatcatttgcgcagtcggctatgccggttcacacactgatcccgaaaaaatcgatatgtggatcggtgatcagcaactgttgaaaaacagccagccgcaagaatttgacgaaaccatcatgaaacagactttagaaaaagaaaaaatcaatattaccgttgatctgaatatcggagagcaaagcgggcaggcttggggttgtgatttaacctacaaatacgttgaagtgaacgcattgtaccacacataaaaatatcagatcgacagttcaagttctcagttcctccaagacaaaaagcaagaaattttgaggaatgatatatggcatgggaaacgacttatttttctggtggaaaaataaattcatataaggagcgaaaagcatgggtaaaatagttgtaaaaatcggtggggtagccagtgataatttaacaaataatttttttgagcaaattgaatcatggcaggctcacggacatgaaatcattattgttcacggcgggggatactacatcacggaaatgatggagcgattaaatatccctgtaatgatcaatgaagggttacgtgtcacaacagagcaagcattaaaggttactcaaatggttctgatgggtcaggtgcagccgacgattacaacgttattccaacagcaaggttttggaacgattggtcttaatgcctctagcgataatatgattcaaggaacgtttattgatcaagaaaaattaggttacgttggtgagattaccgagattaatcctgcagccattgagggggttttgcataagaattacattccgattatcgctcctttaggaatgacagcaaacggccaatggcttaatatcaatgcggatgatactgcgtgtaaaatcgctgaagcccttgaagcagatgcattgtatttgttgacagatgtaccaggagtgaagcaagacgaacaatggcttgaaaaactatcaatccatgaagttgagcaattgaaagcggagaaagtgattactgggggcatgatccctaaactaaatagtgctgtcgatgcgttagaaaatggtgtttcagaagttcatattaccaattgtatcgaatgtgcaggtactgtaatcgtaaaggagggggtctttgcatgagtcatttgtttccaaattatgcaagagacacgattgatctaattaagggttcaggaagctatgtgtatgatcaagagggaaacagctatctggattttatgagcggaatcgctgtcacaaatttaggtcataacaatccaaaagtgatgcaggcattggctgagcaagcagataaaatttggcacagctcgaacttgtataccaatcatctgcaagagcaggtagctgaaaaattgaccaagggaaaggattatttagctttcttttgtaatagcggaactgaggccaatgaagcggcgattaaattagctagaaaggccactgggcgttcgaaaattcttagctttgagcaatcattccacggacggacttacggggctttgagtgcaacgggacagcctgcgctgcaaacaggcttttttccactcgtcgaaggatttgactatcttccttataatgaactagctccattgaaggaacaattagatgaaaacgtggccgcagtcatgttggaagttatccaaggagaaggcggaatcataccagcgaataaagaatggcttcagtcagtcgcaaaactatgtaaagaaaatggcagtttattgatcattgatgaaattcaaaccggtatgggaagaacaggaaccttctatgcgtttgaggcttatcagatcgaaccagatatcattacgatcgccaaggctttggctaacggcatcccagtaggtgcgatgctaggaaagatcgaattagctgaagcttttggccctggttctcacggtacgacctttggcgggaacaatctggcgatgagggtggccgatactgtagttagtgagattaatcagccggaatttttagcagaagttgctgttaagggccagtatttattggatgaactgatcaaattgagtgaaaaatctgaaaaagtcctcgatgttcgaggaaaaggcttgatggtggggatcgagttaaattcgccagaaacgctgcaacagacaattcaagagttgaaggtacaaaatcttttagcaatcaaagctggtaaaaacgtgcttagactactgccccctttgaccatcagccaagaagaattgacaaaaggcttggaaattattaactctgtattactaaaataggtcgatattaactcaatatccataaaaaatccttagcattttattcgatgctgaggattttttggtgtgcgccctgcatgggtgaaaacttggtggtgaaagtccactacaggcttggcagtaggaactgttagcgaaagacaaggtggcaatcgtgaggttgtggctgaaggaagtcggacgcaaactcctgaactgacgaacagaaactagatacaaggctgaattaggtcggataagtcttcatcacaagacaaagtccaatactgcccgaaacctatacagtaaatctagcagttacataggaggaaagttttcactcttaccgggggagatctcatgagggtgttgtgggcgttgaatgaaaacaaaccagcacaacgatcatggcgacatgatggtgaatcatgagaagtcagccgaggtcatagtagtaacgacactgaccgttacgaaggactgaacaataagaatcttgaataatttaggaggtgtgagaagatgcgacgaccgcagaaaacaagaaaacttggctatcatcaaagagctagtgtggaacacgaagggtatgatgaagtgcgcagcacttcttgcggtgaacagaggaaacaagatggtgtagaaaatctgtttgggagaattctagagcggaataatctcaatcaagcgtatcttcaagtagtcagaaataaaggggcggctggtgcagatgggatgaccgtcgatcaactgcttccttacttgaaagagcaccgcgaggaattactatccaatttacgccaagggaactataaacctcagcctgttttgcgagtagaaataccgaaaccaaacggcggtgtaagaaaactaggaattcccacggttattgatcgtatgcttcaacaggcaatcaatcaagtgttacaaccgctatttgaaccagaattctcagataatagttatgggtttcgcccaaatcgcagcgcacatgacgcagtgaagaaagcaaaatcttattatgaacaaggttaccgatatgtggtggacattgatatgaaagcctactttgacaccgtaaatcacgataagctgatgtatttcattgagcggaaagtaaaggacaaacaagtcctaaaactgatccgtcaatacttaatgagtggtgtaatggaaaatggactcatcacaacaacggaagaaggaacgccccaaggaggcaatctctctcccctgttaagtaacatctacctgaacgaatttgatcaagtgctagaaaatctaggacataaatttgttcgatacgccgatgactgtgcgccatgaaagtgtgcgtgaatagataaactattcaaagcagctatgctgtatagatgatggcagacggcctgccgaaaccgccatacaggtggaggtttcaaaccaccttaaggtgctgtagtcaaaagctatggtattgagcgttaaggaaaaggcaaccaagagttgtcaggtgtgtgttatggagatgagtgaccatacgaaccacccacagaagtgtcgaaagcgtataaattccgtcaaaactgggtatagtcgttgacctaggatgagcttggaggaaacctgtttactgatcaggcggcgggcggcataaaggtggcatgaacataacataggcgtctatatggaacgtgggaacccacgggctgatgtcaagggagtatttcaagcggaagccccgcaagaaaagagtaccgatgcagtcatgggggcagattgggttgtagtagtgaagaagctcttgtaacgagagtggagcgaagaacctgagttatccagtttcaaggataagtcaactttaaggaggaggaacttatgcaagaaacaaagtcatacaatatttcaaaacaagcagtttaccaagcatttctaaaagtaaaagccaataaaggaacttttggagtagatgaagaatcaattgaggcttatgaatataagctgaaagataatctatacaaactgtggaatcgattatcatcgggaagttatttcccaaaaccggtaaaggcagtatccattcctaaaaagagtggtgggctgagagtacttgggattccaacagttgaagataggattgcacagatggtagcgaagatgtattttgaacctgtagtagaacgattgttttatgaggattcttatggctatcggccgaataagtcggcaatccaggcaatagagaaaacaagagttagatgctggaaaagagattgggtactggaatttgatattaaaggactatttgacaatatcagacatgactatctaattgaaatggtaaaaaggtacactcaagagaagtggattatcctatatgtggaaagatggttaaaagcacctttccagagggaagatggttcgactgtttcgagaaaagccgggacaccgcaaggtggtgtaatcagtccagttctagcgaacttgtttcttcattatacgtttgatgacttcatggaaaaagaatttcctaatatacagtgggctagatatgccgatgatggtattactcattgtgtatccctaaagcaagcgaaatatctgaagaaaagattggaagaacggtttagaatctttggtttggagttacatcctgataagacaaagattgtttactgcagagatagtgataggatggggaactatccgataacgacattcgatttcctgggctttacgtttagacctagaggcgccaagaataaatatggaaaatgcttcacaaattttcttccggctgtatcagataaagcgaaaaaggcgattcgcaaagaggtaaggaattggcgattacaattaaaagcggacaaaaagctagaggatttagcgaatatgttcaatagtaaaattcaaggatggatgaactattacatgaaattctataaatcagaaatgtacagtctactgcgctacatcaaccaatgtctcgtgaagtgggttcgtcgtaaatataaaaagcgacaagcacgaagaaaagcggaacattggttaggggaaatcgccaagcgagaaagaaatttattcgcgcattggaaaattggaatattaccatcggctggataatgggagccggatgagctgagaggttcacgtccggttctgagagggcctaagggggaggttcccttgggctacttactgcaatatctatgttagaagcaaacgagcaggacagcgtgtgatgaagaaatccattcaatttctcgaagaacaactaaagttgacggtaaatcgagaaaagagtgcggtaggaagcccattgaaacgaaagtttcttggattctgcattctgccaacaaagaaaggtattaaaattcgccctcacgcaaaagcaaaacagcgtgtgaaaagcaagctcaaacaactcactaaaagaaaccgtggaagaagtatccaacttattttaaaagaaatcaagcaactaatgactggttggatcaactactatggaattggtgagatgaaagaattcatgagggagttaaacggttggttgaagcgaagaatcagacaatatatttggaaacaatggaagaatccgagaaccaaaaggaaaaatctgattcgtttagggatcgataaagcgaaagcgtatgaatggtcaaatacaagaaaaggtatttggtcagtctccaaaagtcatattcttcatcgatcattaacagacaaagaactggcccaccaaggatatgaggacatctccttgaagtaccagttcgtacactcaacttattgaaccgccgtatacgggtccgtacgtacggtggtgtgagagactaactatatagagtcaagtaaaaattagccaaatcaaaaaatattttataacagataattccgaaaaaagggtacaacaaataagcttcttaccattagtttttttgaatgttcaatagctaatcagaaacaattatataaggctcgtttttagtcaaaatagcatgaatcacgtaacaaagcttacgagaaaccgcacctaaggcagttagatgatgttttccttcggaaacttttttctggtaaaacgcactaaaaacaggatcacattgagaagctactaaagccgccgaaaacaaggcttttcgcaaatatggagaccctcgtttactcataacattatgcgttgcctcatattgccctgattgtgtcacggaagcgtctatcccagcgtaagcaacgagttttttcgggttagaaaatttttgaatatctccgatctcaccaagaatagtcgcaccgtttataggaccaattccaggaattgtgagaataacagaatttaaagtgtccattatgtgcttgatttctctttccgtttcctttatttggctttcaatgaattttaattgttcaatcattgaacgtagttggaaggtgaacgcttcttgagcaaattttactccaaaggagttagaagctgcttgcttcaattggtccgctttttctgccttgattcggttcctgcttaactcagctaagtattgggccaaagtttctgaggaaatgttttctaagtcgatcggggcactaaacgccagcaataactctttagaagcttttccgaaaacgccctgcttggtaaaaatcgtcgcgtattctggaaagacttgatccaatacggctataatttttcttttgaagtcgctcgctgtacctactaaataagttcggtaacgagaaagttgtttcaaagaaaaaacattttcatcggataagaccgtttcgacaaatgagccatagcgcattaagtcagcaatcaaaacagaatcaataatatcgttttttcgtttccgtatttctgtacctttacgccatccgtctgtttgaaggggattcacaacgtgaatcaaataatctgattcgtgaaggtatgaaaagatggacagccaatagtgccccgtggcttccatccctataacaaagtcactgggtgctccggaatagtcgaccattcgctcaattaatgactctgctccttcagtggtgttaggaaatgaaaaaccttttagtaatacctttccttcctcgttcatgatagaagcaacgtgagtgcgtttaccgatatcaatgcctaaaaagtacatgtatatctgacctttcaaaaaaagaattttggattgaaatccactcaactgaaaagcgtcactaccttgtacgagatacggagtaaagtaaggactttcaacatctaactcatacgcaatccacttatcagagagaggagccagtctctcgagtgcgggttcaatgacccaaggggggaacggcttagcctctcaatccaataaatatattatctcaaaagaaatgagttaataccaaattaaaataacgatggttcatagggttatccaatcaaaaccggaaggttaaaaccctaactctaatatacaaggggcggaaggtcagttggctttcccctctactcgattgatttgttagaataacccaacattttcaacaaagatagaatttatcatcgttattttaaaacccgataaactttgttctaccaacgaattgacttgtgatgatcattatgtttaaaaaataataaacatttaggaatgtaaacggttaaaaaaagagctatcttttaagcgtgagataaacacgaacgattcttaactaagaaaataattgtacgcgcttctcttttagcaacggcggtgcacagctattgaggaagagcagccaatacttgactatagataatctaaagagaggaggatgtttatgaagaagcatctattaaacaaaaatcagcttttttcactgaagcgaaagacgttagaaaagcgcatcagaaaatactattttgaaactggcgatgcaaaagataccttggaatttttacttgtactgcaagtacgagaagaattaaccaatgacgatttttcttttatgatggtggatatcgtcaaacatatcttcatgaaaactaaaaatacgcgtttattgcgccgtttgtctatttttttcgaagattactttgataaaaaagaatggaaagtgttatcacgaagattatttacggtaaaacatttcattgccgataagctagaaaaactatatacccattttgccaaaatgcctttggaaagcttggtcggttcatgaagctgattttttcaggataaatagaaaaggggtggagagtataggtaaaacgagaataagattacaagttaaatatgaaaaaagcaacggaaactatcatcgttttagtatcaaagacgtcaatcgtgacttgccagcagaaaaaatcaaatcctctttgggaaaactagcaatcgttgatctatttgaccaagacggtgtgggactcttcaaaaaagcggttgaagcaaaatttgtcgaaaccactgagtcaaaaatctttgataaccgaaacgatgaagatacgcttcaagaaaaaagtgcggcgtccgaaaaacaattgattcgaattccagaggatctgatcattacagaagaaagaccagaaccagatattttgatccaaaaaattggactgcctaagggaattgatcttcaagaattgaatgatcaacagacgacttcgatcctaattgcttgcatgcacgtcaatgctgagctggaggatgtttggcttgaagacaatcaaattacattgattgagagattgaaaagctaaccaatcattttaaagaaaatacaaaaacagcatttataaaacttttgtttgctttatcagaaatccaacgttggtataaagcggacattcaacaataataggcttagttggcgtaagaaaaaaatcaaaatttttaaacctgctgaaatagcgggttatttgacgagtccgatttttcacagttttattaacttcgctgagagtcagctgcgtaacgttcagcgaaccaagtaaatttcacttacctttattcctcaaacacttctctaaatgttcacttctaattttcctcacacctgagactttccatcacgctttttttcacttatactggagctatcgaattttacctgaattagaatcaaaaaaattttttcagaaatcgtttgaaaaatctagttaggtgatttaaaagaaaaaatttcattagtaagaaataaggagcagtcgaatgggagaacgggcggatatttttttgagtacctttaatcggattgaaaaggaactaaaacgacaattaggcaatccggtgaatatgagctttagtgaagcggtgagacgcttatcaaaacggcgagataacttaattggcgacagtgagaatgatttgctgcagctggcacaattgcgcaatgcgattgtgcatgatcaagtggcggatgattttgttattgctgagccgaatgattgggcagttacacgcattaaacaaatcgaggaaagcttattgcgtccagaaaaggtgttgccaaggtttggtaaaaaagtcactggatttgaacgaaatctgccattggtagaaatcatgaaaatcatcacggaaaaacgtttttcccagtttccggtttatgactctggaaagtttatgggcttgattactttgagaaccattgggttttattttgcccaagctagtctatctggttctgttagtcttaagggacgtatagctgaagatttattgttaggaaacggcaagcgcacgaatttcaaatttgtttcagctgatacaaaagtttctgaggtagaaaaaatgtttcagacagaagccattttagaagcgatcttgattacaaaagatggacattcggatggcaatctgttgggcattattcgaccgcgagatatttatagtcaagaaggggagcaataagcttgttagtcatttatttattattaagtgcaggaatcatcgcgctcgaccaatggttcaaatggtggatcgtcaatcagtataattttggtgaaagtcaaacgatccttccaaatgttttgtcactaacccatattcgcaataccggaggcgcgtttagtctctttgaaggacagcaaatcttttttattgttatcacgattgttgcagtagttgcggtgatttattatctagtcaaacatttacaggagagtaaatggctgaccttaggcttgagcttctttttagctggggccatcggtaatttcatcgatcgtttccgtttaggttatgtcgtggatatgttccgtttggatttcattaattttccaatttttaatatcgctgacatggctttagtgataggtgtcattatgatttttatttatattctattagatgagagagacaagaaaaatgactaatcaaattgaagtaatgataaaagaagaaaccgggaggatcgataaggtcttgaatgaccgcctggcagattattctcgttcacagattcaacaatggatcaaggaacaacatgtttccattgaaggcaaagtcatcaaggcaaattacaaagtaaatgctggagataaaatcctgatcgagattcctgaacccgaagagttggatcttattcccgaaaatctagatttggatattgtctatgaggatgacgatgtcgtggtggtaaataaacctcaaggcatggtggtccatccatctgcaggccatcccaaaggtacgctagtgaatggattattgtatcaaatcaaaagcctatcaacgatcaatgatgtgattcgcccagggatcgtccaccgtatcgataaggatacttctggtttattgatggtggcgaagaatgaccgctcccatgaagcattagcgaaacagctgaaagataaaacctctttaagaaaatatgtggcgctagttcacggagagattcctcacgaaaagggacgaatcgaagcaccaattggtcgttcaaaggttaatcgaaaaatgcaggccgtgatcgaagacggcaaaccggctgtgactcactttgaagttttgaaacgttacgaaggcttcacgttaattgaattacagctagaaacgggacgtacccatcaaattagagtgcacatgcaatacatcggttatccagtcgctggcgatcctttgtatgggccaaagaaaaccttgaaggggaatggacaatttttgcatgcgaaattattgggctttgaacaccccacgacaggcgagatgatggtctttgaagcaccgctgccagaaattttcaaaaaaactttgaaacagttaaaagaaaaagattgatttcttaaatcaggaatagtatagtgtctgtagtaagaaataaataactaaatagtaatcctttaagagtagtcccgtgaggctaagaaggaagtagatagtgatttggtctaggtgcgcctaggtgaacactatcattttgacgaagtcgataacattcctcctacctaactacgggtaggagttttttttgcgaaaaataaaggcatttaaacgaataaggatgtcagttcaacttttcgcagtttactttaggaagagaaactagttccaaaagctgagccgatcatccgcgtgaacgctctagttgaatgatatacggcatttgaatcgaactaatttttccctgaaaaattaattcattaaaacaaataaggaggagacaggatgtataaaaaagaggtagtagatgaggtaacaatgaaacgagcgttgactcggattacttacgagatcatcgaacgaaataagggggttcaggatatcgtcttgatcgggatcaaaacccgcgggatttttatcgcacaaagaatcgcagaacgccttaagcaattggagcacatcgatgttccggttggggagttggatattacattgtatcgggacgatgtgaatgtagcggaagctgaaccggaattacattcatcagatattcctttttcaattgagggcaaagaagtaatcttggtcgacgatgtcttgttcaccggcagaacaattcgtgcagctctagatgctgtcatcgacttaggtcgtccaaaccgtatctctctggcagtcttagttgaccgcggccatcgcgaattgccaatacgcgcggattatgttgggaaaaatatcccaacagccttgacggaggaaattgtcgttgaaatggaagaaaacgacgggcaggaccgcatcttaattcaaaaagaagactaatcagacaaatatttagacactagaaagaggaaatccaatgcaagagtttcacaatgatgacgttgttttagatattcacgaccgcccaagtgcaggccactgggtcggattaagtattcaacatttattcaccatgttcggcgcgaccgtcttggtaccgatcttagtcggaatcaatccaagtatcgctctagtaagttcggggttaggaaccttggtttacttaacggtaaccaaaggaaaaatccccgcttacttaggtagtagcttcgcttttatcgcggcgatgaaattattaatgaaaagtgacggctatccagcagttgcccaaggggctttgacctgcggtttggtttatctgatcgtttccttcattattaaaaaaatcggctctggctggctggataaaatcttaccgccgattgtcgttggaccagtggtaatggttattggcttaggcctagccagcaacgctgcacaaaatgccatgtataacaacggcgaatacagcttcaaatatgtgttagttgctttgattactttagccttaacaattttcttcaatatgttcttcaccggatttttaggattgattcccattctgttaggaatcgttggcggctacattacagcaatgatcttcggcatcatcgactatcaaccgatcatcgatgcaaaatggttggcgatgccagcgttcagtgtgccattcgctacttatcagccaaaactgtacgttaacgcgattacaacaatggcgccaatcgcttttgtcaccatgactgaacacatcggccacttgatggtattaaataaattaacgaaacgcaatttcttcgaaaatcctggtttggatcgcaccttgatgggggatggtttagcgcaaatcgtcgcaggcctagtaggtggacctccggtaaccagttacggagaaaacatcggcgtactggcaatcacccgcgtacacagtgtgttcgttatcggcggtgccgcgatcttcgcagtcttattaggatttgtcggcaaactcagcgccttgatcttaagtatcccagggccggtaatctcaggcatcagcttcatcttgttcggagttatcgcagccagcggattgaaaatcttgatcgaaaataaaattgattttgataagaaaaagaatctattgattgcttcaactatcctagtcattggaattggcggattggtctttgaagcaggcaccttcacattatctgctatggctttagccacagtcttaggaattatcttgaacttaatcctgccggagcaggcacgtagcgagaaatagacagccaagcattttatctaggaattaaaggaggaaatttcatgatcatccagtctgaagagatcagtctgaaacatttattgacggtggaagccttaaccgatcaagaggtgatgggactgattcgtcgagcgcagcagttcaaacaaggtgcgcgatggacaccccacaaggaccaatactttgtttccaatcttttctttgaaaatagtacccgaacccataaaagttttgaagtcgctgagaaaaaactcggactagatgtgattgattttgacgcaaaaaccagctcggttcaaaaaggggaaactctttatgacacggttttaacgatgtcggcattgggggtggatgtagcagtaattcgccatagcgatgagaactactatgatgaattaatccaaagcaaaacgattcaatgttcgatcgtcaacggcggggacggcagtgggcagcatcctactcaatgtttgcttgacctaatgacgatttatcaagagtttggccgctttgctggattaaaagtcgcgattgcaggagatattacccattcgcgcgtcgcaaaatctaatatgcaaatgttgaaacgcctcggcgcagaagtttatttttctggaccgaaagaatggtatgacgaaagctttgatgtgtatggtacctatcgtccattggatgagcttgtacctgaggtggatgtcatgatgctcttaagagtgcagcacgaacgacatgatggacaggaaagcttttcaaaggaagaatatcatcaaaaatacggcttaacgattgaacgcgggaagcaattgaaagaaaaagcgattatcatgcatccggcgccagtcaatcgcgatgtcgaaattgcagacagtttagttgaaagcttacaatcacgaatcgttccgcaaatgactaacggtgtctatattcggatggctattttagaagcagtacttaatggaaaagcgtaaaggggcagataatatgaaaacattaattaaaaatggaaagatcgtaacaaaagacaatcaaacaatggcatgtgacctttggctagagaacgggattatcgccggtatcggcaaagacttttcgggcatttcgtttgatcaagagtacgacgcaaacaatcaattaatcacaccaggtttagttgatgttcatgttcatttacgagaaccaggctttacttataaagaaaccatcaaggatggctcaaaagcggcagctcgcggcggctacacaacagtctgcgcgatgccgaatcttgatccagttcctgacaccgtcgaaaaattcaacgacataaaagcgatcattgataaggatgcggtcgtaaaagtccatcaatacgcaccgattacggaagagcttcgcagcgaaaccttaaccgatcaaaaaggcttgaaagcagccggcgccttcgccttcacgaatgatggagtaggggtacaaacagctggaaccatgtatctagccatgaaggaagccgcggaaaataatatggcgctagtcgctcacaccgaagatgaatccttattattcggcggcgtgatgcatcacggaaaaatcagtgaaaagcttgatttaccaggcattttaagtgcgactgaatcttcgcaaatcgctagagacctgatcttagcagaggaaaccggcgtacactatcatgtttgccacgtttccactaaagaaagtgtgcgtgtcatccgcgacgcgaagaaagccggtgtgcacgtaaccgcagaagtttctccgcatcacttgatcttaatcgatgaaaatattccagaggatcacggctactggaaaatgaatccaccgttacgcggagtagaagatcgcgaagccttgatcgaaggtttgcttgacggtacgatcgactgtatcgcaactgaccatgcacctcacggcttcgaagagaaaaatcaaagcttcttgaaatcaccattcggaatcgttggcagtgaaacagctttccaattaatctatacacactttgttgaaacaggacgctttactttagaacaagtaattgattggatggcagtcaagccagcagaaattttcggaatgacggtgggaaccttaaatattggtcagccagcagacatcgcggtatttgacctgagtcacgaagaaaaaatcgatgacaaaaaatttgcttcattaggagtgaacacgcctttcactggctggccagtcaagggtgcgacactgatgaccttcgtggatggtcagttggtatacaacaaggaggactaagacgttgaaaagacttttaatattagaagatggcacagtatttgaaggggaaggcttcggcgctgaagcaaatgtggtcggcgaagtggttttcaccacaagtatgaccggttatcaagaaacgattacggaccaaagcttcaatggacaaatcattaccttcacctatccaatggtcggaaattatggcgtgaaccgcgatgattatgaatccatcgcacccacctgtaaaggcgtgatcgtaaaagaacacgcccgcttagctagcaactggcgcaaccaaatgacgctagacgaatttttgaagcgcaaagggattcccggaatttccggaattgatacccgcgcattaacgaaaaaattacgcagcgttggaacgatgaaaggcagtattgttgatccagctgatcagtttgaacattcgtttgatcaactaaaagcaacggtcttaccaacgaaccaagttgcacaagtttctacagtaactccttacccaagcccaggcgtaggccgcaatgtggtcgtgatcgacttcggtctaaaacacagtattctgcgagaattatcacgtcgcgaatgtaatttgactgtgatgccttataacactgatgctcaaacgattttagacctttgtccggatggtgtgatgttgaccaatgggcctggagatccgaaagatgtgccagaagcaatcgaaatgattcagcagattcaaggaaaagtgccgattttcgggatttgtcttggacaccagctgttctcgttagccaacggtgcggatacctacaaaatgaagtttggacaccgcggattgaatcatccggtgcgggaaatcgctaccggtcgcatcgattttacttcacagaatcatggatttgcagtcgatgaaaaaacaattgatccagaaaaattaatggttacccacgtagaagtcaatgatggcacggttgaaggggttcgtcatcggaattacccagccttcagcgttcagtatcacccagacgctgcgccgggaccacacgacggggttcatttatttgatgagtttatggaaatgatggatgcatggaaggagcaagcataaatgccaaaacgtacagatattaaaaagatcatggtgatcggttctggacctatcgtgatcggacaagccgcggaatttgattacgccggcacacaagcttgcttagcgttaaaagaagaaggctatgaagttgttctggtgaattcaaacccagcaacaatcatgaccgacaaagaaattgcagacagtgtttatatcgaaccaatcacgctcgaatttgtttctcgcatcctgcgcaaagaattgccagatgcaatcctgccaacattaggcgggcaaactggcttgaacatggcaatggaattagcagattcaggcattttagatgagttaaaaattgaattgctgggaacaaaattgtcggcgatcgatcaagcagaggaccgcgacttgtttaagcaattaatggaagaattgaatcaaccaattcctgaatctgagattgtgaataccgttgaagaagcggtagccttcgccaataccatcggttatccgatcatcgttcgtccagccttcacactaggtggaactggcggcgggatgtgtgacaacgaagaagagcttcggactgtcgctgaaaacgggttgaagctttcaccagcgacgcaatgtttgattgaaaaatcaatcgctggcttcaaggaaatcgaatatgaagtgatgcgggattcagccgacaatgccatcgtggtttgtaacatggaaaacttcgatccagttggtgtgcacaccggagattctatcgtattcgcgccaagccagacgctatctgactatgaatatcaaatgctgcgagacgcttccttatcgatcattcgcgccttgaaaatcgaaggcggctgtaatgtgcagctggctcttgacccacatagcttcaactactatgtaatcgaagtaaatccgcgagtttctcgctcatcagccttggcaagtaaagcaacgggttatccaattgcgaagttggcagcaaaaatcgcggtaggcttgacgctggatgaaatgaaaaatccagtaacagaaacgacctatgcagaatttgaaccggccctagattatgtcgttgccaaaattccacgttggccctttgataaattcgaaagcggcgaacgtgtcttaggcacacaaatgaaggccactggtgaagtcatggcgatcggccggaacatcgaagaatcattattgaaggccgttcgctcactagaaattggaacttaccatgcggagttaccagaactaagcgaagttaccgatgatgaattaactgaaaaaatggtcaaggcacaagatgatcgcttattctatctaactgaagcgattcgtcgcggctattcgatcgaggaaatcaatgagctaaccaaagtcgatcttttcttcctagataagctgcttcatattgttgaactagaaacagctttagcccaaaacaaaaaagatgttgagctattgaagaaagccaaacagaatggttttacggatgtgaagatcgcacaactttgggacatgacagccaatgaagtgcggaaattccgaacaaccgaaaaaatcgttccagtttacaaaatggtagatacttgtgcggcagaatttgaatctcaaacgccatatttttacagcacctacgaatttgaaaatgagagtgttcgttctgacaaagaatctgtcctagttctcggttcaggtccgatccggatcgggcaaggagtcgaatttgattacgcgaccgttcactcagtaaaggcaattcaagcagctggctatgaagcgatcattatgaacagcaatccagaaactgtttcgactgatttctccatctcagacaagctctatttcgagccgttaactcttgaagatgtgatgaacgtgatcgagttagaacaaccgattggcgtgatcgtccaattcggtggacaaaccgcgattaatttagctgaacctttagttaataacggggttaaaattttaggaacaactatcgaagatttagaccgcgcggaagaccgtgatcagttcgaacaagtgctgaaaagtctatccattccgcaaccgccaggtgatacagcgacgagcgcggaggaagcagttaagatcgctgaaagaatcggttatccagtcttggttcgtccaagctatgtcttaggtggacgggcgatggaaatcgttgaaaaccaatccgatttggaagactatatggcccacgcggtcaaagcctctcctgaacatcctgttttagtcgacagctatttagtcggtaaggaatgtgaagtagatgccatctgtgacggagaaaccgtcttgatcccaggaattatggaacatatcgaacgcgcaggggttcactcaggcgattcgatggcggtttatccgccacaaaccttctccgacgagttgaaggcaacgattgaagattatacacgacggttagcattagggatgaactgcatcggcatgatgaacattcagttcgttatccataatgatgaagtctttgtcatcgaagtcaatcctcgtgcgagtcgaacggtgccattcttgagtaaaatcacgaatattcctatggcgcagatcgcaaccaaggcgattctaggtcaaagcttgaaggagcttggctatgaagatggactttatcctgaaagcgacatggttcacgttaaagcaccagtcttcagcttcacgaagctgcaaaaggtcgatacctacttaggacctgaaatgaaatcaacaggtgaagtcatgggaaccgatcgtaatttagcaaaagctctgtataaagccttcgcagcatctggattacatttaccagatttcggcgcagtcttgtttacagtagccgatgaaaacaaggacgaagctttagatttagccaaacgcttcaaggatgtcggctacagcttagttgcgacagatggaacagccaatttcttagaagaaaatggcttaagtgcggaacgaatcgcgaaaatctctgaatcagatgatcacaatgtgattgagttgattcgcacgggcaaagcgcaagtggtcatcaatacgaccgataaaaatcgccaaaattcatccgaagacggctttatcattcgccgtgaagcagttgagcacggtgtaccattgttcacatccttagatacagcggatgccatcttaagagtgatggaatcacgggcattttcaattcaagaaatttaattcacacagagtgaagcatgcttcactctgtcgatttatagggaggccgttatgaagcaggaaatgatgacgattgttcgtcaacaagagttagctccgagaatctatgaactggttttaaccggagaattagtcaaagaaatgtcaacgcctgggcaattcttgcatattcgtgtaccaagaagcgacttattattgcgtcgtccgatcagtattaatcaatacgaccaatctatgggaacctgcacgatcatttatcgtgttgaaggagatggaaccagatatttttctgaaatgtcggccggagatcagctagatgtgatgggaccactaggacatggctttgaaattgacagcctgaacgctggagatactgcctttatcgttggtggagggatcggcgtaccgccgctttatcagctttcaaaagagctgaaggcaaagggcgtgaaggtgattcattttctgggttttgggacccaagaggtggtttattatgcggatgaatttcaagccctaggagaaacccgtttttcgacagatgacggaacacttgggattcaaggtaatgtcggtaatttattgctggcagaagaacgtcaaccagatgcagtttttgcttgcggcaataacggtcttttaaaaacagtcgaacaattgtacagtgaagtcgccaacgtgcagctttcattagaatcccgcatggcttgcgggatgggcgcctgctatgcttgcgtctgccatgtacctgaggatgaaaacaagagtgtcaaagtatgtgaagacgggcccgttttccaagcaggggaggtcatcttttaatgagtattgcagtgaagttacctggattagacctgaagaatccgattatgccggcaagcggatgcttcggatttggcaaggagtatgcggattactatgatttgaatcaattaggcgccatcatgattaaggcgactacaccaaaggaacgctttggtaatgcaacaccgcgcgtagcggaaacaccaagcgggatgctaaacgccatcggcctgcaaaatcccggcatggatgtcgtattagaagagatcttaccaagtttagaaaagtaccaggaactgccaattatcgccaatgtggcaggtgcctgcgaagaagactacgtcgaagtctgcgctaaaatcggtgatgcaccaaatgtcaaagcaatcgaattaaatatttcgtgcccaaatgtaaaacacggcggaatcgcttttgggaccgacccagaggttgcttatcgattaacaaaagcagtcaaagaagtcgcaacagttccggtctatgtcaaattaagtcccaacgtgaccgatatcgtaccgatcgcaaaggccattgaaaaaggcggagctgatggtttcactatgatcaataccttacttggcatgcggatcgacttaaaaacgcgccaaccaatcttagcaaatagaaccggcggcttatccggaccagccatcaaaccagtcgcaatccgtctgatcaatcaagtagcagcagtcagtgaactaccgatcatcggcatgggcggcgtgcaaaccgttgatgatgtcttagaaatgtttatggccggagcaagtgcggtagcagttggtacagccaactttaccgatccatatatttgtccaaaactaatcgacgagctgccgatcagaatggcagagcttgggatcgaatctttggagcagctaagacaagagactagaggagggttctaatggaaaatcgaccgattattgcttttgacttcgcttcaaaacaggaaattgaaacctttttaacccattttcccatcagcgaaaaactattcgtgaaaatcgggatggaacttttttatcaagaaggaccagcaatcgttaattttctacgtagtcaaggacatgacattttccttgatttgaagcttcacgacattcctaataccgtacaaaaagcaatgcgggggatcgcaaagatgggcgtgaaaatcacgaatgttcacgcagccggcggtgtggaaatgatgcaagcagcgaagcaagggttgtctgaaggaacaaaagagaatcaaacaattcctgaattaatcgctgttacccaattaacctctaccagcgaagaacaaatgcatgaggatcagctaattgaagtcagtctgcaagaaagcgtgctgcactacgcaaaatgtgcagaaaaagctggattagagggcgttgtttgttcggcccatgaagtagaaaaaatccatcacgcgacaaacgatacttttatctgcttaacaccgggaattcgtccgcaaggggccagcgttggcgaccaaaaacgcgtaatgacaccggctaaagctcgtgagatcggctcaaattatatcgtggttggaagacctatcacgcaagctgaaaatccttatgaaagttacttacaaatcaaaaaagaatggaatggtgaagcataaatgatcgcagaacaaattgccaaagacttattatcaatcgaagcagtctccttaagtcccgacgagccttttacttgggcaagcggactcaaatcacctatttactgtgataaccgtgtaaccatgagctatccagaagtacgccgtgccatcgcgcaaggcttagccgcaaaaatcaaagaagaatttcctaacgtagaagtgattgccggaacagcaacggctgggattcctcatgctgcttgggtagcagaaattctagatttaccaatggtttatatccgcagtaaagccaaagatcatggacgcgggaaccaaatcgaaggccgaattactgaaggccagaagatggtcgtaatcgaagacttaatctcaactggcggaagtgtgctggaagctgctgccgcagcaaaacgcgaaggcgcagatgtcttaggagttgcagcaatcttcacctacgaactagctaagggcaagaaaaattttgaagaggctaacacaccattaaccactttaacaaactattcaaccttgattgaaagtgccttacaagaaaattacatcaatcaggaacagcttgagctgttaaaaaaatggcggaaagatcctgagaactggttaaactaacaaaatttaaatattgttatttaatatattttctctagctgatttcctctatttagtatataatatcgttaagttcttgaaagcactttacaacgtagtgaagtgttcacttgaaaggcagtacgcagtacgttaaaaaaataaataagttaaatcatagaggatttaattaaataagcaaagaggcttagtattcaacaaaaattgttgatactaggtctctttttgtctttttcagaaagggatggaagcatgagtaagagctatttcatattaagtgaggaaaaggagccgcagctatttaaattgatgaaggattattcgttagcggtcggtgtttgtttttttattactgatatcaatgggtatcagcagtcagagattcccgaaagtcatagtctatgtgaaatgatccaatcaactgctaaagaaaaagccgcctgtgaaaattgccaaatgcatcagatgatttatcccataaaaagaagaagcatcaacaaatatctttgccatgcaggctttactcatgttcccttgccagtttatatcaacaatattttagtcggatatctcattattggacggttggtggaggcacagaatcgccatctgattgaaaaaaatcaatctagtaatgtttctgaagaattgaggatgacaacctatttttcagcagaaagattggaaaaaattatcgaattatttgtcagccttgcgcaaagtaccttaacaaattcgaaccctaaacgaaaaatcgatgttggccagttaagagacgttaacgaaagggtcgaaatccttccgaaaaaaacagaaattgtcaatgcagtaaagtatatcgaaaaaaatcttcatcgaaaaatttgtctagaggaagtagcgaacaaggtatacttaagtcagtattatttcagcaagctttttaaaaaggagctaggaatgaactttgtagcctatttaaaatatcagcgagtaactaaagctaaagagttactccgtcattccaatttgagcatcgatgaaattgcccgacgtgtcggcttctcacaaacaagctatttttgcaaaagctttagggacatcacttcaaaatcaccttctagctttcgcaaagaaataaacagcgaaaattctcaaccgttaaaacaaacgatgactgtctaacaatttaaaaaaaggagaggatagcatgcgaatctatacaaagacaggcgataagggtatgacaaagttagttgatggtgctcaggttgcaaaggattctgatcgggtagaaagctatggaacaatcgatgaattaaattcatggatcggctttattatttcagaaacccaagacacacaaatcaaaaaagaactacaagaaattcagcaaatgctttttgatctgggaacagatttagcaacaccagaaagtaccagaactgaaggacgcctgtattccggaagttcttgctggctagaagaaagaattgatcgctacaccgatgaagctccggaaattgaacgtttcattctacctggcggaacaacaactgcaagtatgctccatgtcgccagaacaatcacccgcagagcagagagagccatagtgaccttaagctggacatctagcttaaatagcgaaattgtcatttttattaaccgtctgtccgattatttttacgcactggcgagagtcatcaatgcgcgggaaaaacaagaggacgtcttttacgagcgaggtgaaaaagttttccataagattaaaagtacgggcttatagattgtattcgcttacgaattatgctattttatctgtaggtcaacaatagttattttatgaaaaggataaatggaaaccagtgtaaatctggtacggtgccgccactgtgagaagcagcgcatgctttgtagtcagatctttttattcttttcattagcgggcatgctgtttcgttgcaaagcaggatgttttctttacaaacccttgttaagataaaagatccagcccaaccaaaataagataactatgtttgccattttattgtacattgctgtacagtaatgggggatgggctggtctttcaaagcggaaagagattacaggtacaaggatgtactgctgactcccttttgttgaaattttacaattaaataaccagtctttacaaggtggtaatgatgcacagcaatgacgctccagacaatgaatgattgtttggagtgtcttttttatttaaggaggaatagtatgcaaaaaattcattttaagacaacgatctggctgggttcagaggttcttgaggggcttaaagagctgaaaaatagacgaatctttttagtagcagatccatttttgatcgaaaacggccagatcaatgaaatcgttcgccacattgatcataacgattacttggtatttagtgatatcgtcccagatccgccaattgagaagattgtcagtggagtgaagcaaatcgttgatttccaagcagacattatattgaccattggcggaggatcggcaattgatgcagcaaaagccatgaagtattttgccaatcgaatactaacaaacaagattgatcaattaattgctgtccctacgacaagcggaacggggtcagaggtaacaaatttttcaatcatcacaattcctgaaagaggaacgaaatttcctctagttactgatgaaattcagccagatatcgccattttagatacgaacttagtcatgggcgtcccacctgcagtcacggcggatacaggaatggatgtcttaactcatatcctcgaatcctatgtctcgatcaagtccactgttttatccgatgcttattgtgaaaaagccatcaaacttgtttttaaatatttggaaagggcccacaaaaatggtgaggatcgacaggcaagagaaatgatgcatcttgcatcttgtttagctggtatcgcctttaatcaaacatcattaggaatcaatcacgggattgctcacgccgcgggtgctcgcttacacattcctcatggtcgagtcaacgggattttattacctagtgtgattcacttcaatgctgatttaaatgagtcaggatatctccaaaatcgtacagcaatgaaatatttgaaactagctaaatgcttaggtgcatcaacaaataatccacgtatgggagtgaacacgctgattcgtcaaattattcagttgcggaacagcttaaaaatgccagcaacactctcagaatttggccttgaaaagagagaggttgaacaagtaataccagcaattgccgaagcagcaataaatgatgcttgcacaaaaacaaatcctgttgtgccatctctccaagacatcgaaacgatcattcaagagattttataaaagcattgacagccctttcaaactaccctataatcgaactagcacaacgaggtgctcccaaaatttaagagcaatgaagctccttgatagaaaacagacattttgttattgttttttatttgggagctttttatgtctactttatttgtctttttctttcataaaggagcacttgttgaagtacaaaaaagaaatttcgcgtactttttaatgagggttgttagatagatcactagagattatttttacacaagggaagtaggcggattcttgaaaaaatgtaaggatgtgaagggatgaatggaagagttgtaatagtggatgatgagccaattacaagatttgatattcgcgatattctgcaaggagcgggctacgaagtcgttggcgaagcagcagatggttttgaagtcattgaaatttgtaagaaaacgcgcccggatgttgttttaatggatattcaaatgcccgttttagatggactaaaagcaggaaaaaaaattattcaggacaatacagccagcagcattgtgtttctatcagcctacagtgatgttgaaaatacgaccaaagcaaagaatcttggcgcaattggctatctggtaaaacccttagatgaaaaatcattgatcccaacgttggaaatgagtattgctcgcggtaaggaaactcaagatttaatcaagcaggttgaaaaattgaagacaaaattagacgagcgaaaaatcatcgaaaaagcaaaaggcattttgagtaaagaaaacggcttatctgaagctgaagcctaccaaacgattcgtaagttaagcatggacaagcgttgtccaatgagtgaaattgctgaattgattgtgataaacgatgagtgatgccggaatgattcaactttgtcaggaatatacctctctttctcctgacgacatcgaagccttgcttcattcagctcagcaggtagaaaagaatcctcattacgaagaaatcgatgtgttcatcgatgtttataacgaaatgaaaaaagaagcattggtgatttatcacaagcggccaaagactcaaaaatccttatacaaacgcgatattgtcggcgaagatgccttattaaaaaatgaaccgggggcattgagaaccttagaaacgggtctaaactcggtgaagctcatggccgtcagccaggaaaacattttaattcagcaatcggtttttccaatcaaaaataacggaaaaacgatcggcgtgatcatcctggaaaagggggtagccgaagacgatataaaagaaagcaatgaacgaatttctgataggcttccgtcatcagaaactctaagtcacttagatcaatccttcgtcaatcagctgcctgaggcgatactcgtctatgataagtatggatttttaatttctagcaataaagaagcgaagaacctttatcgcaggttaggctacaaagatcgaatcaagaatatgcactacgataatttgacccttgattacacaacctttgattacatcatgtatcaaatcggccggcaagcttccaatcaaacgattgaaaatgaaacagcttatttgagctattattttatcattaagaagatctggattgaaaagggcggaaaattattagtcattatccaggataataccgatgtcaaaagcaaagaggccgagatcatttccaaatcggttgttattagagaaatccatcatcgtgtaaagaataatttgcagtcgatcgtctctttattaaggattcaagaaagaagaactagcagttcagaagccaaaaaaattcttcgggagagcgtttcacggattatggccattgcggcttctcacgaattactttctaagcaggttgaagatcaagtttcgctgtatcaaactctggaggcagttgtcttcaattttcgtcacatcatccaaagttcgccagagcgagaaattgacttgactttagatattgaccaggagattcaggttctaagtgatgaaatggtcaccatctctttgattgtgaatgaattgctgcaaaatgtgttcgatcatgcttttgactcccaccaatcgggacaagtaaggattatcggcaaaaaggagaagagtttaatctccattacagtcgaggacaacgggaagggctttgatccaaaggcggatcacggcgacagtcttggattaatgatcatcactagctatgtaaaggataaattaaaaggccggataaaaattgaatcggggagaaacggtacaaaagcctgtttcacctttgaaaatgacaacattgacgttgtttaaaaattaagcaaagacgcttaagaaagtgaaaagaaattttctcttttttaagcgtcttttttatgttttgacaggagggtaggctttgggaaaagaaaaaatgttaaccgttggcatcgacttaggaacatcaactacgcagctagtcttgtcggagctaacgatcgaaaattacgcatctgccttctcagttcccagaattacgatttctgagaagaaagtcatttatcgcagtgagattatttttacacctctgataaatcaaaaggaaatcgatgatgaacccatcaaacgattcgtgaccgaacaatacaaacaggcaggaatcgaaaaaggtgatatccaaatgggtgctgtcattattacaggtgagacggcgagaaagacaaatgctagtaaagtgttgaaggcactcagcggttatgctggagacttcgtagtagccactgcaggaccggatttggaaagcattattgcaggaaaaggggcaggaacggagaagttatcgaagcaatacaaaggaaccattgtcaacttagatattggcggaggaaccacaaatttagcagcctttagagacggagatacgttagatacagcttgctttgatattggcggtcgcttaatcaaaatagacccaaaaacacagatcatccaatacatttcaccaaagctcaaacaaatcatcaaagagcaaaagctattgatagaagaaggtcaaccagtagaaaagcaagagttgaaaaaggtcgttgcagagttagtaactgttcttgaaaacagcgtgggaataggagaaaaaagtgtctattatgatttgctgatgactaaccatggtttaaagctggattacgatcttacctctctaacattttcaggcggagtcgcagattgtcttgaaagtcaggaaaaggattgcttcaaatatggagatatcggtttattgttaggccagcaattaaaagaatccagattattttcagagctggagatcctgccttccgaagaaacgattcgagcaacggtcgtcggagctggttctcatactgctgaggtgagcggaagtaccatttcctatacagaaaagttattgccattaaaaaatttaccgattctgaagctttcgaaaaatgatgaaacacaaaacacagaacagatggcgcttcaaattaaggaaaaactgaattggcatcggttggaagatgatttgtcgcaaatcgttctagctattgaagggaaaaagaaccccagttttatcgaaattcaaagatacgcaaccggaattgttaaaggattgaagccattgattgatgaaaaattccccttgattgtacttgttaaagaagatatggctaaagctttagggcatagtctctttgcccagctgccaaggagttatccctttgtctgtctggattcaatcttagttgaaaacggcgattatattgatatcggaaaaccagtggctggcggagccgttctgccagtgattgttaaaacactagtatttaattaaaaggagtgaaatagaaatgattttgaaaaccatgctttttggtaagacttatcagtttcgaagcgttaaggaagttctagccaaagctaatgaagaaaaatccggcgataagctggcaggagtagcggctgaaagctccgaggaacgaattgctgctaaagtagttctcgcgcaattaactttagaggatttatttaatcatccagttgttgattatgatgaagacgaggtaacgagaattatcgttgatcaagtcaaccttaagatttttgattcaattaaacactggaccgtggaggagcttagggaatggattctatctgataaaacaggtgactttgatattaaacgaatatccagaggtttaacagctgaaatgatagcagcggtttgtaaattaatgtcgaatatggatttgattgttggtgctaagaagatcaaaatccaaaaaactgcgaacaccaccatcggaaaaacaggaacattttctgctcgtctgcagccgaatcatcctactgataatgtggatggaatcatggcttcggtcatggagggattgtcatacggtgtcggtgatgctgttatcggtctaaatcccgtagatgattcaactgaaagtgtcgtgcgtatccttaataagtttgaagaattcagaagtgaatgggacattccgacacagacctgtgtgctcgcccatgtaacgacgcaaatggaggcgattcgccaaggggctccaacaggactagtcttccaatcaattgcaggttcagaaaagggcaacacggcctttggaattagcggcggtttaattcaagaggcacgggatttagtcttacaacagggacaagcagtagggccaaacgtaatgtattttgaaacaggacaaggttctgagctttcctcagaagccaactttggggcagatcaggttacgatggaagctcgctgctatgggtttgctaaaaaatatgacccttttattgtcaacaccgttgtaggttttattgggccagaatatctttatgactccaaacaggttattcgagcaggtctagaagatcactttatgggcaagctaacaggcatttcaatgggctgtgatgtctgctataccaatcacatgaaggctgatcaaaatgatatggaaaatcttaccgtcctgctagccgcagctggttgtacgtatatcatgggaattcctcatggggatgatgtcatgctgaattaccaaaccaccggcttccatgaaacagcgacgatacgcgaaatgttcaatttaagaccaatcaaggagtttgaagaatggttggaaaaaatgggcattatggaaaatggcaagctgactcaacgagctggcgatgcctcattatttcttaaataagagagggtgaagaaaatgaacgaacaagatatcaagaaaatggtggaatcaattttaaccgatttagtggatcagcaaggaaatacggcagtagcaactaaaaatgttacggaagcagccaatgataaagtatccgaaaacgtcgatgagaattgtagtatcgcggacattacagaagtcgatttaaaaaaacaactgttagtgactgaatcaaatgatgcagatggctatttgaaaatgaaatcctttacgccggcacgcatcggcgtcggtcgtgcgggacaacgttatatgactcaatccgtcttgcgctttcgagcagatcatgctgccgcacaagatgcagtgttttcagatgtttcagaggaattaattaaagagttgaacttatttccgactcaaaccatttgccaaagtaaagatgagtatttaaccagaccagattatggtcgagttttcgatgaaaccaattgcgaactgatcaaagacaaatgccaaaaaggcgctaaattacaaattgtcgttggtgatggccttagctcagcggcaatagaagccaacgtcaaagaaattctcccgtctattaaacaaggcttaaaaatgtatgatctggattttgaccaagtactatttgttaaatactgccgcgttcctgcaatggataaaattgcggaattaaccgaagcagaggttgtttgcttgcttgttggagagcggcctggtttggtaaccgcggaatccatgagtgcctatatcgcttatcgtccgacagttggaatgccagaagcacgccgaacggtgatttccaatattcataaaggcgggactcctgctgttgaagcgggtgcttatattgccgagctgatccataaaatgttgcagaaaaagaaatccggaattgatttgaaggaagcggaatagccgaaggagggaaagaaatgagaaatgatcgtttaggagcaaacgtcctaagtgtaaaaatgatcgccaatgctgacgaggacttggcaaaacagtttgacctgccaaaaggaatgaaatcattgggcatcattacttctgattgcgatgatgtgacttatgtcgcactggatgaagccacgaaggctgccgaagtcgaagttgtttatgctaaaagtatgtacggaggagctggaaatgcttcaacaaaattagcgggtgaagtgatcgggatcctagctggtcccagtccagcagaagtgagcagtggtttagccatcgctattcaagtcatcgaaaatgaggcgagctttatcagtgccaatgatgatgatagcattccatactttgctcatgtgatttcacgttctggccgttttctatccaaagaagctaatgtcactgaaggagaagcgatcgcttacttgatcgcgccgccactagaagcgatgctaggtttagacgcggctcttaaagcagcagatgtaaaaatgggcgtcttttatggaccaccatcagaaactaatttcggtggcgccttgttatctggtacgcaatcagcatgtaaagcagcttgtaacgcttttgcccaaaccgttcaaaatgtggcagctgaccccaaggattattaaggatgtgatactagatgacagcactaggaatgatcgaagtccgcgggtatttaggagcagttagtgttgccgatacagcactcaaggcggccaatgtaacgttgaataacgcggaagtcattcgaggcggtataacgaccattcaattaactggcgatgtagcggcggtaaatgcatcggtagaggcggcgacacaaatggcaaaaactttaaattgccttctgtctagtcatgtaattgctcgtttagatgagcaaactaaagctttgatgagggagccagaacaaacaacttctcaaacgaatagtgaagaaataccagaagaaacgactcatcaagaaatgaatgagaaagaaactgctgaagcaaccactatagaagcaaagattcccgaccagcccattatccgcgaaaatgttgaagatgaagggttgaagaaaaaattagtagataaaaaagtttctgagttgcgaacgatcgcctataaaatgaatctccgatcactgacgaaaaaggaaatcaaatttgcaacaaaagaaagcttaatcaaggccattttaatggaatccgaggggagtgaaagtgattgggattaatcgacaaagatttacaatcgattcaagaagttagaaatttgatccatgaagccaaaaaagcacaaaaaacactagcgggcttgtcacagcaacaaattgatcgtatctgtcaggctatttctgaagaaacctataaccaacgggaaaaactagcgaaaatggctaatcaggaaactggttttggcatttggcaggataaagtgatcaaaaatagcttcgcgtcaaaaacagtttatgaatatattaaggatctgagaacagttggcgtaattaaagaagatgtggaaaacagaattacagagatagctgtaccagtaggcgtgatcgccggtttgattccttcaaccaacccaacatcaaccgtgatttataaagccctgattgctcttaaggcagccaatagtattattttttcaccacatcctaatgcgttaggatgcatcacagagacagtcaaaattattcaaacagttttagaaaaagaaggaataccaaaagcctgtgtatccgttatgaccatgcctaccatggaaggaactcatgaacttatggtcaataaagacacaaatttgattctagcaaccggcggaaacgccatggtgaaagcggcctattcttcaggcacgccagcaattggggttggaccaggaaatggaccagcctatatcgagcgcagcgctgatatcaagctagcagtcaaacgaattatggattcaaaaaccttcgacaacggaacgatttgtgcctccgaacagtcgattattgtggagacggctaatgaaaaagaggttcgagctgaattagtccatcagggagcatattttttatctgaggaagaagcggcaaagctagccaaatttattctacgatcaaatggaactatgaatccacaaatagtcggaaaatctgttcaacatatcgccgatctttcaggttttactattccgaagagctgccgcttaatcgtggccaacgaaaaacatgtcggaccaaaatatccatattccagagagaaattagcaccgatcatcgctttttatacagttgaaaattggcaagccgcctgcgatctttcaaaagaaattttgaaggaagaaggcgctggacatacgatggtcattcacaccgaaaacaggaaggttattcaagcttttggcttagaaaagcccgtctcgcgtttattagtgaatacgccagcagcgctaggcggtatcggcggaacgaccaatctagtccccgctctcacactaggctgcggtagcatcggaggaagctctacctccgataacattggtccgcagcatctattcaatttaagacgggttgcttatggaaccacagagttagaagagattcgtagtaatgaaacgtcgacaaatgaggaagcatccccaataacagctaacgaagaattaattaatacgttagtgtcacaaattttagcacggttacaataatttgaaaaaattttaacaataaacttttaggaggaaataataatgtctagtacaaacgctttaggaatgatcgaaacaagaggattagtaggtgcagtagaagcagcagatgctatggtgaaggcagcaaacgtaacattgatgggcaaagagcaggttggcggtggattggtgacagtcatggttcgcggcgatgtaggtgcggtaaaagcagccaccgatgcaggagccgctgcggcagagcgagtaggagaactactgtctgttcatgtgattccacgtcctcataccgaagttgatgcaattctaccaaaaatgattcaagagtaagtctcctaacaaacacatgaataattttactcaaaagcgtagtgcctttcacagcgcttttgagttccagtaaaaagattcttgaatgaaggaggctaaaatgtgaagcaatatgatgcacttgtcgatgaaattgtaaaaaaaataaaggaaacacaacaatcgcaaattccggtagaagcatcaggaagacatgtccatctctcaagagcacatgtcgatcagctttttggagaaggctatcagcttactgaggcaaaaaaactgtctcaacctgggcagtttgcttgcaaagagcgagtgaccatcgctggaccaaaaggaatgttccaaaatgtagtaattctaggacctgaacgaaacgaatcccaggtggaggtttcattaaccgatgcacgaattctaggaattgatacaccgattcgagaaagcggcatgattgaacaaacacctggcatcaccgtgttaaacggggatcaggtcgttcaattaaccaaaggattgattgttgccaaaagacatatccatatgacaccagaggatgcaaaaaaacaacaggtctcaaataaggaaatcgtcaaggtcagaataaatagtgagcgctccttaatttttgatgacgtagtaattcggatcagtccagattttactacagctatgcatattgattatgacgaggcaaacgcttgtggatatcagaaaggtattacgggagtgatagtaaaataggagattgccagtaatgaagataaatgaaatcgaaattatcattgaaaaagtaacgcgggaagttctaaaatccgttcgccttcctacaacggacgtaactctttcaattgctttgcttcggcaaattggcgagtacccaaaagcagtcatcgaaggtttttccacgaaagtgaactgggtacagactgatgttcctacagcaagtgcccttctagtcaactcattatccttatcgcagcttgcagctgtagccaatcttcaggtgatcgatcctacaactgcagcgattcttcagtttttaataaagggaaaaccagtttgggtactggctagtgaagtcgatcgcaataaattgaaaaatcaagcaagattcgcgttattaaagaaatatgatgcactaaaaaaagaaaccgttcaatttggtttagactttgaattttctatcgataaaatcgatcaatggatacacaagcaaaaaagcaaggatagccccttcaagcgagggaaatacttaacacaaaaggatttaattgaattgactaaagaaacgaactctttagtcattcctgaaggcagccggttgacacctctggctgaagattatgttcaagagatgaatattcagattgggggagaagcggatgctgctgggaaaagtgacaggaagtttatgggcaacacggaaagatgaaaaattaaatggctctaaatttatgctggtgaaaacttggaatatgaacttagaacaagcagaaggactattagttgctgcagacaatgcaggagcaggagttggcgacctcgtattgattacgcagggaatggcagcaagaatttccgcggaaaatgaaggaatcccgatagatgccatgattgttggagtggttgattcggtggagacaaataattcagggagtgatgagaatgagtataaatgaaataattatgtatatcatggttgtcttcatgatcattggtgcggtcgatcatgtaatcggtgggaagttaggattaggggagcagtttgaagaaggaatcatggcgatggggtcgctggcattatcaatggttgggatcatcaccttagcccccattttggcaaatttattaagcccaattgtcgttcctttatacagtatgcttggtgctgatccatcgatgttcgcgacaactattttagcaaatgatatgggtggttttgctttagcacaacagatggctgttgatccgcaagcgggtctttttgcaggaacaatcttaggagccatgatggggccaacgatcgtgttcacaattccagttgctttaggaatcattgaaaaagaagatcaacaatttttagctactggtgtattaagcggtatggtaacaattccaatcgggtgtttggctggtggtctagctgcggggatgcctattggaatgattttagtcaatttgattccgatcgtaatttttgctgtattaatcatgattggtctatggtttgcgccaaaagggatgatcaaggggttcacaatttttggaaaaggcgtggtagcggcagcgatcttcggattggttattggagctatccaacaattggtcggtattaccgttatcaaaggaattactccagttacagaaggaattgaagtagttggtgggatcgctttgactctatctggagcgttttgtttagtagctgtcattaccaaagtctttagtaaacccttattaaaactgggagaagccatgggaatgaacgaagtggcggccgcaggtttagtcgctactttagccaatagtatcccgatgttccaaatgatgaaagatatggatcaaagaggaaaaattatcaatgtggcatttgccgtttctgctgccttcgtgctaggagatcatcttgggtttacagcaggtgttgctaaagaaatgatttttccaatgatggtaggcaaattagtggctggcatcactgctatttttgtagggatgttcatggcaaatcgcgtgttaggtaagaaggaggggtaaacaatgacagaaatgaatcaagaaatgctcgaaaaattgattcggaaattagtaatggaaaacttgatgccaacaaaaaatgtcgatccaagcggcattttatctattaaattaccggaaattgaagtagcggaagaggatcgtttagacacaggtaatcccgctgacatcgtttatacaaaagatctagtatctcttcaagaaagccctcgtttgggttgtggattaatggtaatgaaagacactacatttgattggactttagaatacgatgaggtggattatatcatctctggtcaattagatgtagttattgatggcaggacaatatctgctaaagctggcgaaattatttttatccctaaaagcagcaacataaaattttcagtgaccggagatgcacggttcatctatgttacctatcccgctgattggcaaagtcagtagcataagttatttttgagactggtagaagtaattctaccggtttttttcatatttcaaaaaagacgttaagcagcagaaaaatgacgatctagctatcaaatttaatactattgaaaagtatattagaagctgaaaatgaggtttaatggtatagtattttcagaagtttttagaagatagcctatttaactttttcgactatcgaatagaatgattcttctaaaggcaaattaaacatctatacgaataagagggtccaatatgtatgagaaatttgtaagcaatactcgattacgaagattcatagtcttagcactggttatcttcattttatttttagtcagagattttatgacaccgatcttgttaacgttcattttcacgttgatttcggtcaaaatcgtcaaatttgttcaacgctatattaaagctccgacattcttgctggcgaccattctttatctgtttgaattgtggcttttatatcttttaatctcaagatattcaaccattttgatcgatcaagtcgtctcgacctataattcaatcgttcatttttatcagcataaagaattcaattctgacgtggtaacgaacttcatttctagttattttaagaatcataactggcaggataaggttgaaagcggtgctggaattattttggaacaattacaaaatgttggtcgcttagccatcgcttttattgtctcgtttatattgagctttttcttcatggtagaaaaagagaaaacgatcctattttcaaagaattttctgagtagtaattatgcgtggtttttccaggatttgttttactttgccagagtcttcgttgaaacattcggtgtcgtcgtagaggttcaattactgattgcgatcgtcaatacaataattaccacagttggtctaggtctgattggttttacgcaattgccgacattagcgatcatgattttcttcttaagcttaatccctgttgctggagtgatcttttcttgtattccgttaacgctaattgcttattcaacaggagggattcagaccgtcatttatgtattaattttgattgtggtggttcattgtattgaggcctatattttgaatccaaagtttatgtcgagccggacaaagctaccgattttttatactttcgttattttattagtcagtgaaaaatttttaggtgtatggggattgatcgtgggtattccaattttcaatttcttcttagaaatcttaggagttaaaatccgtacgaagttgacaaaagactaatctaacaaaaaaatggaacagccaaattaggctgttccattttctcgtaattgctcaacaactgattcttctggtgttacgaacaacgttttttgattttcataaatcacaaatccaggcttagcaccatttggtttatgaacatgcttgactgcgacataatcaacaggtacttgtgccgattgccggaattttgagaagtaggctgccaattcagcagcttccagcaacgtttcttcactaggtgcgtcatcttttactatgacatgcgagccagggatgtttttggcatgcagccaaatatcactttttcgtgcttgcttcaaggtcagttgatcattttgcagattatttttcccgacgaagatttctgtgccatcactcgcgacaaagcgctcgggtttagaaggggcctgtttgcgatttttcttgctgcgtttcttctttaagtagccgctggcaatcagctcttctttgatgacttcaatatccatcggtccagcgatttctaattgagctaagacagattcgaggtaggcaatttcatctttagcttcagcaatttgatcgtaaatcaatttgactgcatttttcagcttttgatatttttggaagtacttctgtgcattttgattaggagttaatgcgggattcaatttgatcgttattggcgcattgtcctcatagtaattctgtaattcaatgctttccgctccccgtggtacctgtgccatgaaggtggtcagtaattcaccatcacgacgaaattcttcggcattttcggaatcgcttaacgttttttcacgtttagccagttttgtctgattgcgcttgatctcattttcaactttgcgaatcaagtcatttcctaattgcttcacgcgatctttttcggctttttccccataaaaagcatccagcaaagcgctcaagctatcgtatgcggtactttcttcgaaggtttcaaagtccaacggtgcaaagaattcctttttatttttgagtcccaatgtcggtgtaagttcggattgaactgtttcccaaaaatcagcccaaacaaccattttttcatttggtcgtttgccaatacgataagccaattcctcggcggtgtcgcggcccaatccttggaaattttgctgcaaatatcgtccatccaacgtttcggcagttgaaagaatcttgaacacttgctccttggttgcgtgaaatggattcagctgctcttgcttcggcggttcaatatattcgctgccgggaaggatggagcggtaggtattctgtgaatgcccaatatgcttgatggcatcaagaatttttcctgtttgcttattcaacaggacaatcgttgagtgacgtcccataagctcaacgatcaggacgatattttgtaaatcacctaattcatcacgcttactgaaggtgaagtgaaccacacgatcattttcgacttgatgaatatcttctaaaatcgcgccttctaaatgcttccgcagcatcattacaaaattcggcggattgtctggatttgtataagcaatttcagttaattgaattcgcgcgtagcttggatgagctgaaagcagcaagcgccgattctttccttgagctcggatcactaaaacaacttcattttcataaggttggtggatcttcgatattcttccagtaacgagctgatcctttaattctcgtaccatcgcatgggcaaaaactccatcaaaggacattttttatccctcatttctattcataatagctctattataaacaaaaaaacgccagtgaccaagcaagtcaccggcaaaaacttagacagtaatagtttctttgtaattatgaagctgatccagcaggtataaaagtaattgctccgcttcattaggcaggcgatcatagccgccttgataagttttccgagactgaacaaaggctaaacgagtttcaagtcgggtcattaaatgaatcaaatagtgatgactattaaagtccggctcatgctttttgaccggtaaatagctgatcccatttagcggaccaaagggtttaaattcagcggagccatcaatgattttttcaatactgccaagggtttcttctggcgtcactttccgtcctttaaagtcaccggtattcaaaatatagcaatccgtctttttcttctggaacaggtctttgaaatcctgataatcttcctgtaagggataacagcggaacggatttgcaaagggctcaatgactaattgatcggcaacttcaccaacgacattttctgcagttgaacgcttcgtagccaatgtcgccccaaaaaccgctgcaagggaaggatcttcgattttgattactggcggaaggctgtcatccttcattatccaaaacagtccgtcgactttttcatcgatatgatccactcgatttggcgttgcgtagcgactcttgatgctacgaccatttccatttcggatatcttcagtcactagcactttcttattttcttcatctaaggtcacaccaacattttgtgccgtaacaatatatttgatctgttcactagacatcggataatcctgtgttttgtcaaaataagccggttctagcgcagtagtcgagcccctatccttcgaaatgacaaacgcatcgtcatgcagaacatgaacttcgcctttattttttggtttagctaaagtaatcgttgacttgcctgatccagacaatccaaaagccgccatcgtgtattttttatcttctaatagatactgtttcataccgccatgacaagcgataaaaccattgcgatgagcagttgcccaagcaagtgtcaacgtcgctttcttcagctcgccaaaatagcgtagcccgagaattcctgcacaattatgtaatggatcaatcaccaccacaccatcaggaaaatcaggatgctcccagtccgggtcagcaaagatgaagatatctccagtatagatttcgtccgattgctgatagaaaaggtgtttcgcatcgccaatttgaaagttcaataaataggagtagaggttcgggctataatctgcaggaaccatcaaatgtgatttgactgtaaactcttcatctagacccacgatgacttccccagaatagaacttcttcgatcttgcctgaaagactgcttctcgtaaaagctcactataaaaatcagcatcaattccttcttgcccaataattcgacgtgcggctgctgttcgtccaacaatcttgccatcatttgtgactaataccttagcatcagtaggcaactgcaatcgactggtgtaggcaacatcaagatcagtggtgatcgttccaggactagactttgccaacgcataggcatccgttaggtgacgaattcgcgtcacattatttccataaaaagctgtctcgatcacactgcgaatattcgaaaaaagtcgattctttttattgatatccttgtgcgaaaaatgttcaatactgctcatcttaaaacctccccgaaatcaattgttattattataatagcattaaaataaaacgctaacaatccaatatagaacagattttttcaactccaatacgcaaaaaaagccaaaatgatcgctggtggtagcgctcttaaggtaaaaataatataatgataagcaaggaggcgttattatggaaagatatttagcgatagttaaagaaaaaatccttattttttggcgtaaatttattattgttgtatcagaaaatgaacgccgatccttattaattgcagcaagtcttgttgtctttgcaatcattttttcaacttctgcagctttcgcacaaaaggtgattcgacaagaccaactaaatgagcttgtatttgattctttaaaatcagaccatctcattccacttgaatatcaaaaggtggatcaaaaaataaaagagaccaaagccatatccattatgtttagccagccagacggaacatccttcaacaatgtcatgacgattcttgatgatcccgaacaaaaacctatgctaaaccggcaattttattattatccgatcgtctatgatagtgaaacgattgctgaaaagtatcagctagatccgagacaggtaacctttattttcttccacaatggcaaagaaaaaaatcgctttgtggtggagagtctaaaggatttaaatcatgagttcattcctgagttaaatcgattgccgatgtggaagctaaaaaactaaaatgagatttcgaataaaataaatgagcattttttaataaaaagagttgacacctgattttttttccgctaaactaacttcaacattaaaaaaggagtgacattcatgaaacacgcaaacttatctaatcaattaaatagctggcaaaactggcgtagataagttgtatttatgaattcactcatagatacaacgtttagacaacttctaaatcttgtatctatgctggatattttttcatgcttattcccgcatagagaccatctatgcggtttttgtttttttcgaggacaactaccgttaaatatttaggtagttgtcctttactgttttctaaatcaactagcaaatcgaaaaatcatacattaaaaaacaaaaatcggaggaatttatcatgaaaaataaagggattattggatcaatcattgcattagccgttgtattaatcggagtttttgcatatcaaatggggtcacgtcaaacgggcgcggcaacagataataaagaagaactgaaaactgtcggaattttacaattcattagtcatccatcgttagatcaaatcaaagacggagtgatcaaaggcttaaaagatgaaggctatgaagacggtaaaaatatcaaaatcgaatttttaaacggtcaaggcgaccaaagcaaattaaacagtatgagtcagcaattattagaaaaaaactccgatgtattaatcggagttgcaacaccagctgctaaagcattggcaaacgcgaccagtgatacaccgattattatgtcagccatcagcgatccgatcggcgcgggcctcgtaacagaccttgagaagccaggtggaaatatcactggagtcaataatttaacaccggttgatcagcaattagatatggcgatggaaatgtttccagaggcgaaaacagtcggtatgatctattcatcttcagaagaaaattctaaatcacaaattgatcgagcggaaaaacgcgcaacaaaagatggcttaaccgtgaagaaatatgcaatcagctcaagtaacgatatcgctcaaatcacacagcaagcttgtcaagaaaccgactatttatacattccacaagacaacacgatcgccagtgcttttcaaacgatgatcaatgaatcagataaagcgaaaaaaccagtatttgtatccgtagacaatatggtaaaagaaggcggaattgcaactgtgggtcagaatcaatttgagctaggtgtggaatctggaaaaatggcggcagatgtcctaagcggcaaatcaaaacccgcatcgacaccagtcaacgtgattgattatggggatatgattatcaacgaagacaaagcgaaagaattaggaatcacgattccagaaaaaatcaaagaaaaagcagaagtagttaaaggggagtagacaaatggttatttcagcaatcggacaaggatttctatgggggattttaggattaggcattttcatgacctatcgcatcttaaatttcccagatatgacaacagaaggttcatttccgttaggcggtgcagtctgtgtaacggcaattacaaacggagtatcgccaatttttgcgaccctgttaggaatcgtcgctggaatgtgcgcaggttttattaccggcatgctgtatacaaaaggaaagatcccagtcattcttgctggaatactcgttatgtcgggattaaactcggtgatgctgtttattatgcaaacacccaatctttctttattgaagcaaccaaagatccaagatttctttacgaatttaaatctgccggatcattttgatatcgtcctattagggctaatcgcaatcataattatcgtaggcctgctattgtttttcttctttactgatttcggtcaagcctacatcgcgactggtgataatgaaaatatggcacgttcaattggtatcaacactgatcgcatgaaagtcattggactaaccttatcaaatggcgtgatcgctttatcaggtgcgctaattgcccaaaatgacggttatgccgatatcggtaaaggtgttggtgtgattgttatcggtttggcttcaatcatcatcggtgaagtcttatatggagaagtaactttcattgaacggttagttgcgattgttttaggtagtatcatctatcaattattaattttagttatcattaaagctggtttagataccacctatttgaagattttctcatcaatcattttggcactatgcttgatgattccgcgcttaaaagaagccttgaatttgaagactggattagagaaggaggagtaattgtatgaacgctgtagaagtaaaaaatgccagcaaaaccatcagtaatggcatcaatgataaacgcaagattttaaataatgtcagcttaacgatcgctcctggggaattcgttacagtcttggggggaaatggtgcaggaaagagtacactatttaacagcatttccggcagtctgcaattggacaatggaacagtttcggtgatgggcaaggatttaactaagctttctgaagaacaacgagcgacctcgattgcccgagtctttcaggacccaaaaatggggaccgctcctcgtttgaccgtggcagaaaacttaggtttagcagaaaaacgtggacaaaaacgccgtttgcggcaacgccagctgaatcaaaagaaagaaatgtatcgcgaactttgccaactgatcggaaatgggctagaaaatcatctcgatacaccaacaggcttcctttctggcggacagcgtcaagcgttaagtttattgatggcaacaatcacaaaaccagatttactattactagatgaacatacagctgcacttgatccgaaaaccgcgaagcaattaatgcttttgaccgatcaacgaatcaaggaagaaaatctcacctgtttaatggtcacccataaaatggaggatgcattgcattacggcgatcgcgtgatcgtgatggaaaaaggggagatcattaaggatatcagtggcaaagagaagaaacgcatgacattggcggatctattcctgctatttgaagagagtgacgcagtagctgaagtaatgtaaaaagagtttttttacagaaaattagaataatgggttgacttattagaaaaacaaatctatactaagttcaatcttaaatcagtttggagcgaattttatgaataagaataagagtacgcacacacaactgaataattattactttagctattttagataggtttgtgttcatggttcatggatgcaaacgacaacaagtttgtatctatgatggctaaggattttaagttcgacttaacgccacatagatgaaaatctatagtggcttttcttttggtatttttttgggagactaggctcattgtagattttctacagtgggccttttttgtcagtccaacttttcgcagaattttgagtttgatgaaaattaatagtatcaaaaatcaattttcgaacaagaaatttagttggatgataggcgtacgagaataagttcatttttctcggttttagaaaaatgaacttccataagtcgagctagctgcgagtcagatcaagcaacacaaaaagaaaaatgaaggagtgaggaaagatggaaaatgaaatttcaggaaagacacgattagccgggctatatgcactgcctgcaagacacagcttttcaccgatcatgcacacaacagcgtttcaagcaacaggggtggatgcagtttatctaagcttcgatgttcagccaggaagactcggcgaaagtattcaagccattcgtgatcttgaaatgttgggagtcaatttatcgatgcctcacaagatggaagctgtcaaacatatggacgagcttagtcaggccgctcgattaattggagcgatcaataccattgtaaatcaagatgggaagctgatcggacacattacagacggaattggctgtatggaaagcctgaaacaaaacaaaattgacatcatcggcaaaagaatgacgattcttggagctggtggagcggcgactgccataatcacccaagcggcgattgatggagtagcagccattgatgtttttaacatcaaagatgatttctatcaaaaaattgaaccaaagctggcaatgatcgcagaggaaaccaactgtcaaatccaactgcacgatttagcggatgaaaagcaattagctgatgcgttagccacgagcagtttgttagtcaacgcaaccaatattggtatggcacctaacatcgatcaaatgccaattccagatgaaaaagtattaagaaaagatttgccagttttcgatgtcatctatcatcctggtgaaacaaaacttttaaaagctgcgaaggcgactggagcaactgctgttaatggcttaggaatgctgttattccaaggagctgccgcctttaaattatggacaggcaaggaaatgccagtcgatcaaatccaaccgttattggaaaacgaaattaaaaaataaaaagtgaaggaagttattattatgatcttaattattaaaaaaggaattcaagaatcagaattattcccaattttatctcgtatcaaagaagaagggttaggcgtacaaatcaatcatgggaaagatcgtttagttcttggtcttttaggagatccaaagattatccagaatgtaccattccaagcctacagtgtagttgaacgtgcagtggcgatttcaaatacctacaagatcacatcaagagaattccatccacaagatacagtcgttgacgttgacggagtaaaaattggtgacggcagtttcgtaacgatggctggtccttgttctgttgaaggcgaagaacaaattatggaaacagcacggatggcaaaagctggcggagcgaaaattttacgcggcggtgcttacaaaccacggacttctccatacgctttccaaggattaggtgaagaaggcttgaagatcatgcgtaaagccgctgacgctcatgacttgaaggtgattacagaggtgatggatgaagcccatatcgatgttgtatgtcaatacgccgacattatccaaattggtgctcgcaacatgcaaaacttccgtctattagaagcagttggtaaaactggcaaaccaattggcttgaagcgtgggatctcaggtacgatccaagaatggttaaacgccgctgaatacattgctgttcaaggcaattcaaacatcatcttcattgaacgaggcattcgaacttacgaaacagctacacgaaacacatttgatctaagtgctgtgccattgattaaaaaattgagtcacttcccaattatcgttgacccaagtcatggtacaggtgtttgggacttagttgcaccaatggctcgcgccggagtagcagctggagctgatggaatgatcgtggagattcatccagacccattacacgcttggtctgatggagaacaatcactgaatgagaaaaattacctgcaaatgatgagtgaagttgaagttatggttgatgcaatgaaaaaaatcaaagacttaaacaaagaaacgtcacttatctaatcagggggaaacgttcatggaaattgttctaccagaaaaaacttacgaaattatcgtacgacgccatgccttagattccgtcggtgaatggatcgcctcactttggcaaaacaaaaaaatcgcgattatcagtgatgagaatgtttatcccatctacggtgaaaaaatctttcagcagttaacaaactacgaggtctgtcactatgccgtaccagctggtgaaagcagcaaatctctaaccatggctaataatctttatgaatttctagccgatcaacaattcacccgcagcgatgccatcatcgctctgggtggcggggtagttggagatttagccagtttcgtagcatccacttatatgagaggaattgcttttgttcagatcccaacctcgttattggcgcaagtcgattctagtattggcgggaagacagcagtcaattcaagtaaagccaagaatatgatcggaacctttgcacagccggatggggtcatgatcgatccagagaccttgaactctttacccgagttacgcgtacgtgaaggtatcgcggaaatcattaaatgtggcgcgatcagcgacgcttcactatggcaagaccttcagaaactaacaggagtccaagatctgctggagcatagtgaagcgatcatttcaaaggcgctaaacgtgaaaaaaaccgtcgtggaagaggacgaatttgataatggttcccgactactgctgaactttggacatactatcggacacgcgattgaaaacactgccggctatggaaaaattagccacggtgaagcggtcgcgatcggcatggtacaaatttctcgagctgcggaaacaaaaggactttcaccgaagggtatcacagatgaaatcaagacgatgaatcaaaaatacgggttaccgaatgcttatcagccgtgggaagcggagaaattttattccgcaattacccatgataagaaagcccgaggtgatagtttaaacatcatcttgctagatgaaatcggtcaagcccgcattcaaaaaatcaaattaactgaaatcaaggactttttaatagaagggaagtagtcatttatgcgttacttaacagctggagaatctcatggaccagaattaactacaattattgaaggtgttccagcaggactaacactttccgttgaagccatcaatcaagaattagctcgcagacaaggcgggtatggacgcggtggccgaatgaagatcgaaaaagatcaggttcgcatcacatcaggcgtacgacatgggaagacattaggttcacccatcaccatgatcgtagaaaaccgtgactggaaaaattggcagaaagtcatgtcggttgaaccagtcgaagaaaaagcggaaaaattacgtcgagtagcaaaaccacgtccaggacacgccgatctcgttgggggcataaaataccatcacagcgacttacgaaatgttttggaacgatcatctgctcgtgaaacaacgatgcgagtagctgtcggcgcactggcgaaacaaatcttagctgctatagatatcgagatcgccagccatgtggccatactaggtggcatagaagctaccgtaccagaaaaaatgagtgtatcggaaattcaatccaaaacagctacttctgaagtaaacatggtagacgaaacggttgaagaagcggtcaaagaattaatcgatcaaaccaaaaaagccggggataccatcggtggagttgtcgaagtaaggaccgacaatgttcccgcaggtcttggcagctatgtccaatgggatcgcaagcttgatggcaagatcgcgcaaatcatgttaagcattaatgcctttaaaggcgttgagttcggtattggatttgaagcagcacaccaaccaggttcaaaggttatggatgagatcgtttggaataacggctacagtcggacaagtaatcatcttggcgggttcgaaggtgggatgaccaatggtgaacaaatcatcgtacgcggcgttatgaagccgattcctacactatacaaaccattaatgagtgtcgatattgacaccaaagaaccatataaagccagcgttgaacgttccgatagcacagctgttcccgcggcatctgtcgtagcagagcatgtggtggcaaccgttcttgcagaagaaattttagaaaaattctcgtcagataccattgatgagctgcaacaagcagtagcagaataccgtgaagctatcaaaaacttttaagagagagggtacgtctatgagaaagaaagtgttcgtcttaggacttggtttaatcggcgcttcactttgcagagcaattaaaaattcaacgatcgagttgttcggctgggattattcacctgaaactcgtgaaatcgctcgtgaagttgaactggttgatcacattgcttctattgaaagagcacctgagatggatgtcatcattttagccgtacccgttctatctacactgcactatctacatgagttggcacgtttgccgctaaaagagtcagtgattgttactgataccggcagcaccaaaaatgaagtcatgaaattggcgcagaatctgccgtttactttcatcggcggacatccaatggcaggctcacataaatcaggcgtcaaggcagggaatccgaatctttttgaagaagcttactacattttgacaccacctgaaggagcagatgttgatcccttaatggaattactagaaccgacgcgggcaaaatttgttgtgatcgaacctgattctcacgatgagatcgtaggtgttttgagtcatttaccacacatcgtggcatcaggtttggtaaaaatgagtgatcaactaacagaagagcatccacgagcaacacagctcgcagctggaggttttcgtgacattacgcgaattgcttcatccgatccgcaaatgtggacagatattttattaaccaatcgtgaaattttactagatttaattaccaactggcaggatgaaatgtccaaaatccgtgagagcttagttcaggaagaccagccagcaatctacgacttttttagtcaggcaaagcattctcgcgatcatttaccaaccaaagaccacggggtcattccggcattctacgatctttacatcgacattccagatatcgccggagcaatcgctaaagtaatgactatcataagtgaagccaatatctctattatcaatttgaaaatccaagaaacgcgcgaagatattttcggcgttttagagctttcttttaaaaatcaagcagacttggaaaaagggcagttgttaattgaagaagcagattttcggtgtcgcagaaggagctaacaaatgaaattattaaaaacaaaagcaggtctcactggagcattgactattccagcagataaatcaatttctcatcgcagtattatgtttggggcaatcagtcatggaaaaacaatcgttcataattttttaagagcagaggactgtatgagtactattgcagtttttaaagcattaggtgtaacgattcatgatgacggaaaagatattttcatcgaaggaaaagggttcgaacatttacaagagccaaatgaaattttagatgcaggaaattccggcactacgatgcgtttggttttaggaattttagcaggacaaccattcacttcaaaaattgcaggggatgcgtcattgaaccggcggccaatggaacgggttatgggaccattacgatcaatggggggcaacttgcaagggcaagatggcagtgaatttccaccaattgacatacatggtagtgaattatcagcgatcacctatgaaatgccgattgcgagcgcacaggtaaaatcatcgattctctttgccgcactacaagcaaaagggacgaccactattattgaaaaagaaaaatcacgcaatcatacagaagaaatgatcaaacaattcggcagcactatttcagtagttgataaaaccattactatagccggtggacaacaattaaccggacaggaagtaaccgttccaggagacatttcctcagctgccttctatctcgtagcggcaagtttattgccagatagcaatctgcaattaaatcatgtaggaatcaatccgacccgtactggtattttagatgttttagaaaagatgggcgcgaatatcaaacaagtcgctttagataagcaaaatcaagcagcggatttattaatcaagactgcgccactgaaggcaacagaaatcagtggagaaatcattccacgtttgattgatgaattgccaatcattgccctagcagcaactcaggcagaagggacaaccgttatccgcgacgcgcaggaactaaaggtcaaggaaacgaatcgaattgatgctactgctcaggagttgaataaattaggtgcaaagatcgaaacgactgatgatggattaattattcacggaccaacacctttacatggcggaaatgtcgatagtcatggtgatcatcgaatcggaatgatgctccagattgccgcattattgacagatgataccgttgaattgaataatccaaaagcgattaacatttcttatccaaactttttcacagatttacagtcattgatcgaagattagcagaggaaatgttggcggtaaggtttataactgaatcgagcattatcaaaaaagttcagtccaacttttcacaggaaaacgaaaaaggagaatgttttatgaaatcaattgtcttgatcggttttatgggagccggaaaaacgactgtcagtaaagaacttagtactgcattaaacgctcgttcagtagacatggatgatatcttagttgaacggatcggccaacccatcagtgaatactttgaagaacatggggaagcttcatttcgtgagcacgaaacgaagcttttaaaagaagcgctaaatgaagagacagtcatcgccactggcggcggcgtcattttacaaaaagaaaatcaaaaagtcttggccgataaattagtcgtctatttaaaggctgacgcgaatgttcttataaaaagaattcgcgaggacaaggtaaacatccgtcccttggccataaaaaatgatgatggcgatttaaaacgactgttcttttcaagagaaaagctctacgagaaattggctaaaattaccgtagacacttcagaaaaaacacctgcggagatcgttagtgaaatccttcaacaagtcgaggttatctcctaatgaaagttggctatttaggacctagagggtcatttacttatagtgcggcggcaaattttttcgaggaaacggttttatctccttatgattcattgactgcattattagaagaacaaagaaaaggaaccttagactattgtgtggttccaatcgagaatacaattgaaggttcagtattacccacgctggatttgatctttcagacactgccaacaattcaggcagaaattgttttaccgatccagcagcaattgatggtgcatccagcccatgcaaatacttggcaggatacagaattaatttgcagtcaccaacaggctttggcacagtcccaagtgtttctgatgaatcatttcccgacggtcactattgaacaaatgggatcaactgcacagggggctcaaaaagtcgcagaccatccagaaaaacgttacgcagcaattggttcaagagcagccgcggaacaatttggattaacaatcgtacaggaaaacattcaatccatcagcgaaaatgaaacacggttttgggtaatgggcaatcaaccgttgaacagcagtttagaaaaaggaattaacaaagcgacggtcttatttgatctagctgcagaccatccaggggcactgtatcagtgtttagcgatatttgcagctgagaagcttaatttgacgaagatcgaatcgcgaactcaaaaaacaaaattaggcgagtacttctttattattgatcttgaaactcctgaacaagaaaagctgcagaaggtcttacgccaatttgaagaggaacattttacggtaactctaattggtaattatccaacatattttccgaatcttagaaaatcttagtagttaaggttttctaatttttttggtgaaaaataagacaaactctagatgatttgctatttttatactaatagcaatgaagatgaagaggtgcactatgagccgaatggataaatataaaaaaattcatgaggagagtcaaaaggaagagaaaaaaccttttggctttcgtcgtgagatgaagaaagagaagcaaacagaaaaaagggattttgaagacattaattacgaaaaagtagaagaatctcatcaagagccagaagaagaattctattatgaggatcattatcaagaatccaaaaagaagcggccaaatattaagcttccggctatcaaaaatctgtttaaacgaaaacctaaaaacccatatgaacagaaacctaagaaaaagcgcagctggaaaagaattttagtgatgattttagtcgcactcttaggctattctgttatagcctttggtgttgggaatattgctgccaagactgattcttctatgccgaaaatggagacgcaagaatttaatggtgcagcatcagaaaacggctcaaaaaatatcctgcttttaggcagcgatactagggacaatatcagtggacgttctgattctatgatggtgctgcaggttgatggtcgcggcaaacctaagttagtttccttcatgcgggacatgtatgttaatatccctggtgttggtgaaaataaactgaacgcggcttacgcttatggcggcgcagatttggtgcgacagaccttgaaagaaaactttggaattgattgccgctattatgcgatggtcgatttccaaacatttgaaaaaggtgttgatgctctttttccaagaggcgtacaaattgatgctgaaaaggatatgagtgcgtatattgacgaacccatcacgaaaggcccacaacgaatgaatggacacactttgttgaactacgctcgtttccgaatggatgaagaaggagactttgggcgtgttcgaagacaacagcaggtgatgcaatctgtcttcggtcaattaaagaatccactagtcttattacgcggtccttatgcagctggaaagatttggggatacttatcgacagacatgccaaacatgtttgtattaggaaatctattcaactttgctaaagccgtcggtggaatcgaacgcttgactttacccgttgatggttcatggtcttacattgatacagcgaatgccggtagcgcattagcggtcgatactgctcaaaacgctcaagcggttcaagactttttagggaagtaactggatttttgattcccatgaatctatgagtgtgctatattataattattgtaaattttgattgaaacgaggaaaactattatgaaattagcgatcgtgacagatagtaccgcctatctgaatgaacgcatacgcaatcataaagatttatttattattccgattccggtcatcatagatgatcaaccttttgaagaaggggtagatattgggtatgaagagttttatcagaaattgaaaaccagcaaggatttcccgaaaacatcgcagccagtacttggcgaagtattcgaattgtatcgctcaatcaaggagcagggctacgatactgttatcagtattcatttgtctgaaggtatctctggttttgtccgcacattgacagcaatcaaagaagatatcgatggactgcaggtcattccatatgattcaaaaatcaccagtgttcctatgggctatatggtagaaaaagcactggagttaggcgatgaaggaaaatcactggatgaagtattggcagcgattgatgagattcgtgacactactaatgcttacattatcgtagacgatctagacaacttggttcgcggaggacgcttgacgaacggcgcagcgattattggtgggttattaaaaatcaaaccaatccttacctttgaagatggcaagattgttttagcagaaaaaattcgttcattaaaaaaagccttacaacgtacggaagaaatcatcgaagaacgtcgtcaggaaaatggtcatgatttacgaatcttcgtaatccatggaaacaatcctgagttggctcaacaagaatatgaaaagctaagcaaaaaatatccagatgcgacaattgaaatcggaacatttggaccagtaatcggcactcatttaggtgataaagctatcgctcttggtgttgcgaagtaattatccgttcattgattataacaagtttagaaaaaatctaacaaaaagaaaaccgaaccgtcctatatctttccattgcgaaggtgtatggcagtcggtttttttgtagtatttttcgtagttccacgtagcacaaacgaaaaactgatattccctttaaaatctcaatagaaccgtttagtttgatggtacacgcaacgaagataaaactcattttttcgggtttaaaaaaatgaatgcattagtaggagttagttgcaaaaacttgttttatttcgtattcttttttcattagtagtttagtaatttactaaattactagtgcgattattagaaacttattcaatgaatgaaacagactaggaggaagttcaatgaaaatccctactaacttaaagcataaaccagtttttctggttgaaaattatgataaaatcgacggacatcatgcctgggatagtgacgccaaagggttaacgctaggcttagcacaatggaacgatcgcggccgcgtggatatttctggaaaagtttggcgtcatactggtgaaaagtggtcccgacaatcagaagaattacccattacgagaattttggacttggcaatcttagtagcgcaatcaagtatctatttgcaagatgcttatcgctatgagaaattttatgaccctgaaaatcctaaggtagaaattatcggcctacaaggaggacggatggaagttcaagttgacacagaaaatccaaaaatagatgaagatatcattttattcaacgatacaatgaataaagatggcgatttgattgcacagcgttatcgcaccttgaaacgtcttttggatgaactaggctactaaaacaaaggaagaggtgagaaaggatggatcattcttttgccgttacaaatggacgaaagtttaccaaagtagaagaacagatgatttggcgcaaaccggctagtcacaaaacgagtcaggaagaaataagaatcgcatcagaaatcaaaaacaattggctcgatcctgaaatgaagatcatgaatgtgctcctagaaggagacgccggatctggcaaaacgcagctggcacgagctttatcagatgatttgcagcttccgtataccaaagtcacttgttttgctgatatggacaaaacggatgtcttcggtgccttattgccagttgtttcaacagatagcgatgaagatcaagaattactggaagctatatatcaaacggattctttacaagaagttttatcagtaattgcaactcactttcaaattgatgcgaaccaagcaaaggaacgtttaagtaagttaattgaacgaatcgatcaagcggataatactacaagtgttgagtataaattttatccctcagaaatcgttcgggcaatgcaaaagggctatttgctggaaatccaagagccaacagttattcgtgacgcttccgtcttggttgcattgaattcggctttggagccaaacgggttgttgaacataccaactgggatcattcgccgacatccagattgtgtcgttatcatcactaccaatcgcaattatcagggaaaccgcccgctaaacgaatccttgcgggatcgggtgcagcatgcagaaaaaatggacctgcctactattgaagtaatgattgaccgggcaatggctaaaacgaattttactgactatgattacctggaaattatggctaaaatcattcgattattagatgaaacagctaaagccaatgcaatcaaaggggttgctggtatgcgttcctatttcttttgggtcaatagcttgaagcagggacaagatcctttggagagtatttttcctaaagtcctgtataagttgactacagatgagaatgaattaaagatattgcaagaggctttagaacaaagtagattactaacagaacttcaacaagtaaaaaatcagcaaaaattaaagcaaggcagaaaaatcagccaagcggaagccgaccaacgaaatatcgtagaagaggcggaagaggcgactttaaaaaatgaagcgatagagactgaaggctctgtagaaaacgaggaggaagcaaagccagaagaagttgtttcggaaaaagaaaaacaaccggattctatagaaattcctgatgaagctaccagaaatgataccgaagccgaaagtacttccgcttcacttgatgaagaagaaaaaatcggctctgctatgtcattagatgaaatggccgaaatcgataaagcgaagcgaaaagaactgaatcgcgagatccgtgagagcttgaaggaaacaattcatgcaaaagaaggaacgattcttcatcgaccaacaattaatgagatagccatcaaaaatggtcaagaattaacgcagcaggtgttaccagaagttgaaagcttaagtcgcgtgatcaatgacctcctgactaaagaggtaagtaatgatttttctagtggcaaatactatggagctcgttttaatccaagtcatgtggcctatggtgatctgcggaattttgacaagaaaaatccaccaagtgaaaatccatcattggcattagccgtccgtgtcgacgagtcaggttcgatgctgcgagatgaccggattcaaaatgctaaattagcagctgttgcactaagtttatttgccgagaagacaaatattcctttgatgctttatggcgactctgctgatcttagccagcgagaaaaaacatcgatctactcctataaagagttcgatgacaattatgatttcatagcagcaaagctgtctacaatgaagccgcgtcaaaacaatcgtgatggtgtacctttgcgattattagcagaaaaattgagtcatcaagcagcggatacaaaagttttattatccatcagcgacggacaaccgaaagcattaccggattatactggagaaaaagctcggcaagatatccaaaacgtgttagctgactatgagcgaaagggcattctctttattgcttgtgcgattggtgaggataaggaacagctgcgggctttatatggtgaaaataattttgttgatatttcagatatttctaccttgccacaacaattacttcaattaatcgcccgttttatttaaagattaaaaaagtcaaacacagagacacttattaattggaagtgtttctgtgttcgactttaactttttaactatttctctaaaagaagttcgttcaaatcgatttagtaagtcgcgcgtggtccgccaatatattttggacgactgcgtagagctgttacgtgagcgccacctaattctttgatagaaggacgaacaggaacctgaacgtgtttgacatgcatcccaatcgaagtatcaccaatatcaattcctgcttgagcaacaatatgttcaacctctactggatcactaaattgttcaaaggctgctacagagcaagagcctcctgcatgtaacgctggtttaacggatacgatctcccaatcctttttctcggcaatctctcgctcgacaacaacagcacgattaatgtgttcacagccttgaacacccaaatagatctttttaggatcaaggatcgatttcaatgtttcgataacccattgaccaacttcttgacttgaattttttccgatccttccaccgacgatttcactagtcgtacagcctaaaacaaaaacgtcaccagctttaaggttggcttctgctaaaacatcgttgacaatcgttgataaatcttgttgtaatttttctttttccatttgaatgacttccttctattaactatttatattgagggtgacgtagtactctttgcaacgcgtgataaagaggaatggtcaccgcgataccaaaaatattttgtacaagattacctggcagcgaggctaaaccggctggccaaccaaatagcaatgccgtagctattgcatagccgataatcatgaacaaactggcaaacaggaatccaaaaaataatccttttcgatttggaaatttattatacagataacctagaatgaaaccttgtagtccatgaatcacaatcgaaaaaattgcccattccggatatccagaaatcaaatcgatcaagcctccgcttaacgcacctactaaaaatccaccagtcggaccaaaaagcatagctgaagcataaatgcccacttcacacaatgtcacgaatcccttagtcgcaggaatcggaataatgaaaagaattgagagagtgacagtcagagccaccatcatcgccaattttgtcatttcttttgttttcatgtcataacctccgattttacgctatcaccgaaccaaacatttccctctccgttttttaaaagtagtccatttttgatcccctgataaacgtactccttgctatcttcaatcgcgttaaccaaatctttgcctaaaactaaattcgctgcaatagctgatgcaaaggtacaacctgcgccattaatcgttacgttggacaatttaggtttagaaaaatactgaaaagtctcgctattataaaaaaggtccgaagctaaattgccagaaagacgttgaccacctttaattacaactgattgtgcaccaagatcaataatttttttcgcagcttgctccatttccgtcggattagaaattttctgctgacttaaaagctctgcctcttttaaattcggcgtaattaccgtagcaaaaggaaatagctcaatcaatttttctcgatagctatcattatatacatgatcagtttctttgaaggccataactggatctaaaacgattggaccatcaaatgaacgcaaaaagcttttgacgatttccagcgactctaattgatggattagcccaagctttatcccatctaatgaaaggttatcttttattgtattcaattgatcgtttaaaagttcagtaggcaaattagtgattgcaaactgtccatttttaacaaccgcaatacaggtaatcgcagtcaaaccaaataaatgatagtcctcaaatgtctttaaatctgattgcagaccaccaccggctaaagtatccgatcctgcaatagtcaatattgtccttgtcataaaaaaactccccaattaagacgtatagatgcaaattattttataattcaatcaatgacctcattataaagttatacaataaaaaagaaacagccaattggttgtttcttatctcatccaatttcaagtgctattatttgtaccagctagggaaatacgttagcataactagtgaggaaggggattatgtatatgaaaatatttgttgccggagctaccggaagagtaggcgaagaactgatcaaaaacttagttgaaaaaggacacaccgtttacgcaggcgcacgtcgtgatgacgcgattgaagcgaacgaatctgttaccccggttcatttagatctgcatggcacgattgatgaaatcgccaatacattaactgatgcagaagcagtttatttcgtagctggttcacgaggaaaagatctattacaaacagatttatttggcgctgtaaaattgatgcaagcagttgagaaaaagggaattaaacggtacattcatttaagttcgttattcgctttgcaaccagataaatggagtggcgcattgactgactataatatttcaaaattcttctcagacaattggttgattgataaaaccaatttagagtacacaattttgcaacccggcagtctaaaagaaactcccggaagcggaaaaataactacaaatatcacagagaaatctgagaattccattgaaaacgttgctgctgttttaacagaattacttgaacaagagaatactattcaacaagtcattttgatgggggatggcgatacgccaataagcgaagcagtaaaagaaatataaagaaaatgatccactcgacgagaatcctagtctgagtggatttctcttttcttaattcagtcgaggcgaaaaatattaaagaatttcttagtctttctactaacttaatgataaaatagagactgccgaacatagaattccgtgattaaggagtcgccttatgaatcttcaacatatccatgatcttagaatcgaagagggggttcaaatgatcagaaaaagaaagattgcgaaatattatatgaagcagcaaggctttactaaaaaagaagcgtacgatacagcaattaagacacagcctgaatttgctgaagcgcgtaatctttatcttgccttgtttaatgaagcaaaacccatattcgctgatcgtaatgaaagagaaaaggcactcagagtgtatcaggttttcagtatgatcgctttgatctgctttgttatctggttatttagcaatggttatttagacggttctaatgtaacagataatttcctgttgattgcgttggtaatcaatgttgcaactacaagttatttcgatgaaaaagtaacggaacgaattcatgaaaaaaaaattaaaaagcttttacgagacagatctgaagcatcaagaaaattgcataaggtagaagaaatcaagcgaaatatttttcgagcggagcatcgtggtctgacgttagtagaagaacgcaaagtagaagacgaaaaaaatgccgagccgcaatcgaaaattattacacttgaaaaaataaagacccttcgagggaaaatcaagaaatagccgactacgtgaagatactacgtaattggctatttttgtgtttaaatcttaaatcaatttgctttttatgaaaaggtttgcaataattcccattaaagagattaaggaggcaaatgaatgattaaggcgataatatttgatatggatggtgtgattgtcgatactgagtttcaagattttcgcattcaacaggagttcatcaaaaaagaaaatccatcgatcaatcaagtaaaaaccaatttcgacgaattgattggtcagtcttacaatatgctttatgaaacgttaagaaaatttatcggcagcaacgattctttaaatgaaattaagcgtcgttttgaagcatacaatgccattgcgtatgaatcaattaactaccaacaactgttccggaaagagcttcttccaattttaaaatgggccaaatcaaaaggagttttgttggcagtcgcatcatcttcaacctatgaacacatcatcgaagtgttgaattcttgtaacatcaagaattattttgacgtgatttatagcggcgaatttgtcgaagaaagcaagccaaatccagcgatttatttaaatacattagaaaaactaaatgtctcagcaaatcaagcgatcaccattgaagattcttattatggcatcagcgcagcaaaagcggctggtattaccacgatcgcctataaggaaatgagagctgctattgaccaaagtgcggctgattatttagttgaagacatgacggaagcctacgagataattcagacattaaataaataggagagagggaggcaaataaaatagaaataaacaatcaatttaatatgatacaccaactattaatgacggtacaaacgaacttcattatggtaccttgtactcaaaacagctatagaggtgattttcatgattgattttatttctaaagaagaatttttaaaggccggattggattttacagacctttttgaggaatcgctattcgagtattatctagaattagatggattaatgtattacgatcctaagacaaaatatatgtacgataaacaaggagtgaaagccttttatgttgaacaggttttcactagtgtagaaagatagagttttttaagacgctgtaaaaaatgcagcgttttttttattggatttttttgcaaatcgtttttctaaatttttagatcataaaatcaatttggtgagattatttttcattgattttatggaatgtgagtttttgattttatttgataaaataattagttggaaaataataaaatacttaaacgaactgaatgaacggaaaatcggtataaattttaatagataaattgtaaaaatgtaaatgataataatataccgtgaaaagctatgaagtcataatttagcttaattagtgaatcaattcaaaagaaacttactatttaactttgtttaatgtatattatgtaaactaaaataaaaaaatttaaaggagctgttgtttagactcctttattcattaattatttgtttctcaattttatctaagtatttgtttgcagtagcttagaaatattcccatagcctagttcattcgcgtaatctttagcagttttaccataattatcgacaatgttaggatctgcgccatgttttaacagttcagcaacaatatcttggtaaacctgtgaaccgtctcttaatgcaacggcttcaatcaacgctgtatatccataatcattttgatgattgacattcacatgaccatcatttaaaaggatttttacattttctagatggcctttttctgcagccggaattaatgcgtttccaccaaaacgattcgtaatcgtttgatctggcatgctattagacaacatataagctaaaatctctgttctgccttctgcacctgcatacagatatggactgtcctgaatagtatcctgttgattgacatttgcgcctgccttaatcaaatttttggcaatttccacttgattattatgaacagcaatcattaagggtgtttctgctttttcattcatttcgtcaatcggatacgagggagatttaagaatctctgttacttcatcaagattattagctgaaactgcctatagcaaacttcctgaagcataagtcaatgtcttctcctcctttgttttttgtgtactggataatttgctttccgagtttttcgaagaagtcttgggtatcgattcatcacttgaagagctactcgtttttttatttgatgaaccaaactgacagcccgttaaaataaataaaaaaagcatcatgataatgatttttttcacactatctctcctcccgtaattattttctatattcacaatctgtgtttcagataacttctctttcttttttgcacattatagcattcatgagataaatcattcctatagaatgcttcgataaaagaatcattctaattcataaatcatgtttattaagatttgcttatgttctttaaggcagcaaatataaatgctgatgtatcaaggcattttacggtacttggtttgaccttcgattaaaaaaccgataaactatttaaggaaatggaaaataatgatgaggagcatgaaaatgtctcgtttaaaaaaatataatgagtttataaatactagagttggctttttcagcctgctgatcggtttgctttggctgaaaaatatgtttgcttatgtggttgattttcatttaagtattcaaaacccgatgcaattatttattttattaatcaatccattaagtgtttcgatgctgttaatcagcattggtctttttattaaacgttcaaaggtcgcttatacgactttatttatcatttatgggattttgtcaatctggctcttttctaatgctgtctattatcgtgagtttactgattttattacgatcaatacgatgcttggtgcgggtcaagtttcgactggtttaggtgaaagcgccgttcgtctttttcgctggtacgatattttttacatcttagatttatttgctttacctgttctgctttttaagaagaaaattatcgttgaggaaaaacatccgcgttttcgtaaagcggcggctctttccgccctctccttactaatatgcagcggaaatatttttctggctgaaatagatcgttccggacttttgagtcggcaattttctcgtgaatatttagttaaataccttggtgtcaatgcttttactgtatatgatagttatcaaacctttcaaaataaccaaatccgagcagaagcaagtccaaacgatttgaaggaagttaaaagttatatcagagaacattatgctgaacctaatgattctatgttcggtattgctaaagggaaaaatgtggtctacattcatttggaaagcttccagcaatttctaattgactatcaattaactgatgaaaatggtgtcaatcatacggtgacgccgtttctaaatagtctgtatcatggggaaagcacttatagtttcgataacttcttccatcaagtgaaggctgggaaaacttcagacgcggaaaccctgatggaaaattctttatttggattgaatcaaggtgcattattcacacaattaggggataaaaatacctttgaagcagcaccgaatatcttaaaccaaaaagctggctatacatctgctgtattccacggacattctgcgtctttttggaatcgtgataagacctataagcatttaggctttgattatttctttgattcttcttattatgatgtgaatgatgacaattccttccaatacggaatgcatgataagcccttcttaagtcagtcggttcaatatttggagcatttacagcaaccgttttatgcgaagttcataactgtgtctaatcattacccttattctagtttcaagaatgacgaagatggattccctttggcaaccactaaagacgaaacaattaatggttactttgccacagcgaattacttggataccgctctcaaagaattctttgattatatgaaagctagtggtctatatgacaaatccatttttgttttatatggcgatcactacggcatctcaaacacacgtaataaagaattggcttctctgcttggaaaggattcagatagctggaccgattttgacaacgctcaactgcaacgagttccgtttatgattcatgttcctggcacgacaaacggcggcattaaccacacctacggcggacaggtcgatgctctccctactctgctgcatttattagggattgattcgaagaaatatctgcagttgggacaggatctattttcagctgaccacaaacaggttgtcgcgtttcgcgatggggattttgttacaccgcaatatactttctacggcggaaaaatgtatgacaatcaaacagctcaagtagttgatgaaccaacaccagaacaggaaaaaacctttattgaattgaatcaggctgttgacgagcaattgatcacctctgataaaatcacaaacggcgacttgctgaggtattatcaagatagtggcttgaattcaattgatccaagttcatatgattaccacaaccagaaagaacgtttggaagaaatcgaacgacaaaaaggagcgcagtcttctagcttgtatagtgagaacaatcaacgatcaacagttgggctatataaaacgaaatcctatcaacaatatgagtaaaataaaaattcctccagttttttgactggaggatttttttagctttgttttctttttagagcttcttttcttaatttgcgttgagctttcttcgaaccgcgatcaatatcacgacgctccttacgcgtatggaagtcttcgaatagattttcaagctcataatctgctgggtaaagttcactagcccggaactcgagcttgattcgacgcttaggcacttcgacaaactgttcatttaaaaagactgttacattatccgtaaatggaacttcctgataaacaagggctgattcttgctgttctaacaagaaaactttatcgcctttataataagttatttcaatagattcagatatctgctttttagctttctttttaaagcttttcttctcaagactatagttacgatctgtaaaataattctgtgctttagcgataatctgatcagagatcgccattttcttagcaatccacagagcattactttctcccgtttgtccgattaataaacgatacttcggcgtcaaatgctcagcatcaaaatccatagctgcggtaatgaaatccggatgttgttcagcaaaacgcttaatctcaccgtaatgtgtagtagttattagaatattccctttttgatagaactcttccatgatcgcaatcgctagggcagcgccctcattcggttcggtcccgctccctaattcatctaataaaatcaggctgttcttatgcgtttgtcggagaatttcggaaatattttgcatatgaccagaaaaagtactcaaagcattctcgatactctgtgcatcaccgatatcaacaaagatctgatcaaaaatggcgatctctgttccatctttggccgggatttgtaagccaatcatcgtcatcagcgtcattaaagcaacggtttttaaaacgacggtcttcccaccggcgtttggtccggtgatggttaagccgcgatactcctcaccgatggttaaatcaagcggtacagctttttcaatcagcggatgggtggcagataccaagtgaatatacccatcagtatttatctctggtgttatgccctttaactcacgactgaactttccccgagcaaaaatatgatcaaactcagcaataatttcaatattttgttgaattaatggtaatgcttcagctagcaaacccgtcaaagttgcaagaatttgataaacttctgactcttcaacaagtttatgataggtcaattgctcgttccaacgactgacgctgctaggttcgatataagcagttgttcctttacttgaaagctccacgatcgttcctttgacttgtttcttataggcggccttaataggtaccgtaaaaatatcatttcgtttagtgatgatcgcctcttgcattttctctttattttgacgaataaatttcttcaataattcttgaattttatcttgtgtttctgcaatatctcgccgtgcacggcgcagttcacgattggcatcatcaacaatccgaccattacggatcacctggtaaatttctgcctcaatttcattgaaatcatttaaccctagagcataacgattcaatgttggagcaatactttggttcttctcgaaaaattgctgaatcaaacgtagactacgtaagaagtctgcatattctaataattcttgaggggttaggacaaaccctttttctagttgattggtgatatgttcgatgctttgcagccccataaatggtacatgcagattgctatcaagtaagtttttggcttcggttgtttctgtcagcctttttttaacaactgaaagcttagaatgtggctgtgtcccttctataagtttcttaccaaaactgctaattgcatagctgcttagttgttgtttgatttcattaaattgggtttttgtatatgtttcgttattcatggtctcttcctttcgattgaaaagacacctatcgaggctttgggaaacttagcagtaatgtcattatgaatttcgtatacatatgattttatcagctatgggagtcggataaacagacactcagttagctcacttataatgaattatttttccaaaaagcggaaaaataatcctatcttcgtatgcatacgattccactagttgcgctaaagtgcacggtggaagtcgcaaaaaaagctgtgaagattcctcttcacagcttgaattcgagttcatcagctttgataggtatcatctaatttggcatgcgaaataaacctgttaaaacagtctttttttcgctatcaagttactccaaattaaataactacactcaccaagacacctcataatttttgttaagtttccttattcctagtctaacctgactgaatatttttgtcaaatccagttaaacaattacgcgattgtggctggaactggttttacgccatcattgataaagtacacttggtaccaagtcaaaaatgtgtagattgtccagattttacgacgaccgtctgctgttccagcgaaattatcgtctagtagtttcacaattttctcttgatcaaagaactctttgacaaagtcttgcgtaaagacatcccgcacgatttgataaaatttctcctcacgcaaccaatctttgatcggcactgggaagcccaatttttcacgattgtaccattcctctggcaaatgacgcgcggccgcttgacggaaggcaaacttcgtattttcagcattgatcaaatatttggttggtacaatttcagagaccttcatcatttctttgtctagtagtggtacccgaacttctaatgaattagccattgccaatttgtcagccttcaagagaatatctttcggcatccattggtgcatgtccaagtactgcatttttttgatttcagacatatcttgaactttttcgtagtgaacatcaacaatgtctttgatcgttggactttgttggtattcaggctgtaaatagtcaactgcttcatcttcttcaaagaccttcgcttgaccaataaagaactcttccgctggtgctaaagaagtgtacaaatgcaatgcacctttaaaggttttgcccttcaaccctttagcgatcgagtaacgcatgcctttcggtaattttttcaaaccttccgctacaaccttaactgcttttgatttcgtgttcattccataagcctggtacccagcgaacaattcatcagcgccttcaccactcaacgccacccgtacatcacggctagcaagttcagttaagaaatacagcggcacacatgaagggttagaatctggttcatccaaatggtattggatcaacgggaagtattcgaaggcttcatcgccggtaacgacacgagaagtattgtttaaatcaattaaatcagccaattttttggcttcaatcgattcgttataagacttgtccccgaaaccaatcgaataggaatgttctgggcgtaagacagctgttacgtagcttgagtccacaccagatgacaagaacgaaccaacttcaacatcggcaattcgatgcgcttcaactgatttcaccacggtatcatcgattaaatcaacggtttcttccaaagtcatattggtttcttgctctttcacatcccaatattgctgaatgtctaatttgccatctttgtagataaaataatggccttctttgatccgataaacatttttgaagaaggtttcatccagtgctgaatattggaaggtcatataaggtttcaaagcttccttatttagttctttaacaaagtttggatgctgcaagaagctcttgatttctgagccgtacataaacgttccattcattatggtgtaataaagcggcttaattccaaaatggtcacgagcgccaaataattcttgttttttcgtatcccagatgacgaaagcaaacatgccgcgaattttttgtaataagtcaattccatattcttcataaccatgtaatagcacttcagtatctgcatgtgttgtaaacacatggccttttgcgatcaaatcttcgcgaatactttggtagttataaatttctccgttaaaggtgataatttttgtaccgtcttcatttttgattggctgtgtaccgccttcaaggtcaataatacttaaacgacggaaacctaaagcagcaccttcatcaataaattgtccagcgctattaggtccgcggtgaacgattgtatccatcatatttttaacaatttgttctttttgcgttgtatctgaacggtcaataaatcctacaattccacacacaatctctaccctctttcaaacatggtaaactgatactctttcatatcaactttcaaagtatatcataggatttacggactttcacgagtgaacgtgatttcctataaaaaaagctcaaaaatttaatttttttcaaagggaaaagagcagggttttaaaatgagtcagatttagaaaggattcgcgaactcgccagctttcgcttattgctcaaaagctaaatcatgaggctgaacatggatatacctgcttattcatgtaaaaatttaatcctttacacaagtaaaaaacaacacgcatttcaccaaaagaatttggagcaacacgtgttgtttcattattcaataatagtcaatggtactaagaatggataactgccaaaaaattcgatcaacgatttatttttacgatcggtatttagcttcaaactacttgactcatcctgtaaattctgttcgattgtcaccgtctgattgccgtctaacgcgatcaggtaactattttcatcaatttttttgaagtcatagttttcgttattcatagtcgtgataaagattctgtccagcacatcaactggtgtcttatgatgaagatctactgtcagatctagtggcttgctattatctaaaagattgtcatcaaattcgaatcctagctctttcatatgtgccatgacatcattcatttcacgactgaacattgaattttgtccgctagtgtaaatatgcttgttatagcaatctcttaataacgtcaaaacagcttcatctaaaacagtgactttcatcgtttctggataaacttgcattagtttgatcttttcattgcggaatttaccgtcagaggtcggcatcatgaaactaaagttgataacattctcattagttaagcgatacgaaagattgaaatgcttgctttcccaagttgaaaaatcatttgttgaaaggtaaagtccataattttctaatggcttaatcaactcaaaggtaatgtattccaataaagcgccctttgcgatcgccgaaatcgaaaactcttccttcaaatagattttacggaagtaatccaacaatgtcggaaaatctgattccattaacacctttcggaattttaaatcagcaatttctttttctgcatcatcgattaagcgaagtaaatcctgatagttttcactgcgattatcataataatttagggaagaatcactaacaggtttgttttgaggcgttgccttaaaggtttcaacggattcctcggtcggctcatcatcggggtgaagaatttctttctcgcgaatattcaagcctggttcttcagactcgaccagtgcatcgtaaatctgattgattttatttttttcttcagtcatttattctgcccccctgtttaagaaatccttgataaaaatttcaagtgcggcatccatttcttccaaaccgccgaacctttttttaatcaagcgcagctctttcaatgcaattgcttgttctagctcgattctggcaattttgttctctaacgcaatcttttgtgactctccagatagctgatcgccaacaaaaggagtccattcgcttcgctgtctttttagttcctttagcttgtcatcgattacttcgatttcttcttcgatttttttgcgattcataaagcttttcgtttcttcaagctcagccttgagtttttcctgatgtgcaatcttgccatttatctcacgaagctctgattgagcggcaattgtttttgcatcaaaatcatcctgctggttttgaagttgcaatagttgttctttatattcaccattcatgaccttttcccattgttcacgaatctcaggcaatattttaatagttggttgtgtagcatcgacttgcagcaccgaccggtctcgatagtagctgccaatctgataatttatcaaaatcggtgagacgacatctcgcatgatcataaatgggaacgtcctctgaatttcttgatccaatttgcttgtcaaaaaattatcgatttcatgatttgcgttactggattgttgaattgaagctggcaattcattccaatagatctggtaaacatcgcccatacgttcttctttcatagcttcttccaaccgtttgatctgccccatcaacccacctaacacatcggaagcagattccttcactgaatcaaatgatgtttcagtttgaagttcttcctgtttctctggagtctccatctaagaccctccttcatttttaatacttaactatataataaatattaccataattattattgatactattcattgtgagagaaaatatctaaatatttcctttagaatcagaaaccactcctctattttaccctagccgagagataatgataagcataaactgttgacgtacgtaaaaaaaaagattgtgtcagacttaaaaaatgacacaatctttttaattaatttgttaatccgctgaagaaatctttaatttgctgccataaatttgcaaaaaatccttgattatcttccaatgtacctttgagtgaatcaccaaactttcctagttgatcagagactttattgaccgttcctttaaaatcatcgctaattttatctagttgttgaatggattccttgtctaatacgccgtcagttgtttgatactgttgtgcaagagctactaatttgttgacatcatctttcgttacatattgggaaagattatttttttccaatgcatcattgacaattttttcaacatcttctttcgtcgccaactcattttgtttttccttaagctcagccaattcctttttaatatctactaacgtctggttcaattgtgccttataggcttcatcagccttttctttttcgctgtccgacaggttttgattttgactttgctcattggctttattgacaaccgattgtgaaacatcagaagttgtgtctaattcggtctgtgctaattgagctctttcaggatcaacagtctcgccatttgactcaaacgctttatacacacctgtcaaagcactttcccctgtcacttttaccacactagcaactttaactgtcgcatcagtaatacccgctgtaactaaaggatttttatattgatctgcggtaatttgcgtaatattttgcggagttaagatgttgacattgatcccttttccctgatcttctcgattcacaaccactgaactcaacatgacactatcatcaccgctgccatagcctaaatattttactaaatcagcgccagttgctttttccatctttacgctgtcttgattgattcccaatttatccatcgtttcgtttaattgttgctgattcaagcctgccccggcaacaaatgttggttttccccaccgctcattaattgctccatcattagcctccgcgtggactttagaactgccgatcaatccagcacctatcgagagtcctatacctgctaataaaatatatttatgaaatttcataacaatgcctcctgtttcttgatagttttattttagctgatttacttctgtttactaactcagaacccttttgtttaaataataatttaccaaactaagaatctcttaagctttttatcagtcttaagttggaggtaaacgtggattttccatgatatagaaaaaacttcccaacaaaagctgttgagaagtttttgagaattacttttctttcgtcgtaaaatggatcttaccttgatcatcacgttccaagtaagttacttcctttaggtagctaaaatgtagttctttgatgctgttatcctccaacatcgtctcgtaaccttcaaaaattgctcgaatgtattgtttgtatgcttgcttttttcgttgtcgcttgttcataagacaccgtccttcttggttatcttaccaatctacggcttttcagacaagtattttattgatatgtttgacttaaataggtcaataactctttggatagatctgttgcggaggttccttcaggcttattctcaaggaactcaaccactgagtaattctgtttctcggaatcaaaagcatataagaaactattttcttgtcccttttcatcttgcttttgtttgatttctgcggtgcctgtttttgcaactaaaggaatatttagctcagccaggctgtgggccgttccattttcatcactgaccaccgcctgcatatcagcagtaatcgtttcagctgagctggctttaataacttctttttcattctttgtctctttgtcagcaatcaacttaggataaaccatcgttcctttattaggaaagacggaataggcagtgatttgctggattggattaagtaataattgtccttgtccatagccggtatccgctaataagatttctgagtcaaaactgtccttgctagaaatttgtgctttattcattgcaatcggtagatccagttccttaccaaaaataaatttgtttaatccatctcggaaagttttttcacccattttcaatgtctcttgcgccatataaatattgtcagaatagactaatgcagtccttaagttaactggactaacatctgagacacgcgtcacctgataggaaccccaagagctatccttttgccatttcaaaccgttaattgccagctcctcgttcggattcagtgtaccggcatccaagccaatcgcagcagtaatcgttttaaaggttgagcctggcgcatacccatttgcgaaacgactcataaagggctgatttttatcattgctataagcttcgtactcagactgactaataccattcgtcattttatttggatcaaaacttggtgaacttgctgccactaatagctcaccagtttttggagccatcaccacacttgaaccagcttgtccgttcaaactgttataagcgatttgctgagcgcgactgtcaattgttaatttgacattttcaccatcttttttgtcgatcttctgcaagacctttttctcatttcctttactatcagtaatagctagtgatccgccatctttacctcgtagctgcttatccagagccatttctaatccgctacgaccaatcaagctatcgctagcaagttcactgtttttcttcatatcctcggcagtcactttgcctacatatccaattagttgtgctgctgcttcttttagaggatacgtacgaccagttacttctttgacttctaacccttctggtgtttccttcggtgcatctgcggtagtttttaatggtacaaagaaatcatcttggacccatccctgtgctaaagcggaatccacatctttagcagtaatatctaaacttttagcaatcgcctcgattttagccgtccgttcttctccagagccaagatttttgggaacgattcccgattggtaaactgttccattcgtggcaataccttgaccgctacgatctaaaatctccccgcgagtcgctggatcaaccgcgtagttgaccttatcctttccagacattccaggaaaaatcaaattcggtttccaattaatctcttttccagcatctgttaatgtgccagagtatttttggttacttattttcccaaagcccgtattcactgataacttgtagctaaatcgataggtgccgtctttcttatctaccgtcaaatcagtcattttgatattcgacgcactgataccagagaagattgattgatacttttcggctacttgtttttttgaatagccgctcgccttcactgaatcagcatttagatttttggtgatatcttgatagttctctttttgcaagcttttaacaaaggccttgacggttgcctctccttgtttttttacttgactcgcttgataagcgcgaacaccaaagaaaccagccaccagaaaaattataattccaacaataataattggcagttgtttattagtttgtttttttgtacgtgtacttctctccatacaggattccctccctagcttctttcgtccagtttctttatactataaaaaaggacgtgttaattatgaatcattgttacctattcatcggaccaagtggttcaggaaaaaccagcttggctgaaaaagccttcgctcctgaacaaaaagttatttcgtatacgacgcgccccccacgtgaaggtgaggaacatggtcgtgactactattttgtatcaaaaaagaaattcaagcaaatggtcaacgatgaccaatttgcggaatatgatgtttatgatgaagaattttacggcattgctaaatcaactttgcgagaagccctaactgccggtaattgctatgatccgataaccacaaccggttttatcaatctacatcggatttttggtgatcaaatggttcctatttggatcaatatttcgcaggaaacaatgatcgcccgtcttgaaaaaagagcaacacctaaagaattagagcgccgtttagcaatttttcaagaggatgtagaaagtcttgaacgattaaaaaaatttcccaatctgattgtcatcaatggtgaagctacactagaggaaatgctgcttcaattacgtcaagctctggattaattgaaatgctttgcgttctccgtgctcaaatgggaaacagatcattccacaataaacaaaccctaattttttgatcaaatgcaacattggctgattagcgggataggtatcgatccgaatgtcttcaaagcctaaaagcaaagcctgctgaatggctaaatttagcaatttttcccctaatcccagtccacgataattttgactgactgcgacatgatgcaatgctacataaggtccattactctgccatgtcccatcaattgcttcatagacaggatctttttcagcaatcagcgcaaccgttccgacgatctcacctttaagagtcagcacatagctggctttttttcgtatatcttcgcgaatcaccccttcgtgaggctcgtgaccattttgccactggggtgatccttgatccttcaaatattgtttagcctgattgataatggtaccaatctctggaatatcctcataggtgctcaaccgaaaatcaaaatcctgttccttcagatcgctagtttttgcttcattgccaaaggttaagatcgtttccgcatcttttttacccagaatgcctcctaagatttcccccgtttgtttggcttgtctgacaataaaatcttcatcttcatatcccattattttttccatcctctctgccaatgatccccatgctctaaaaaggctccaaccaactccaaatgatgtgccaatgaccatttcttgattgtccccaatccgggaaattttcgtgtttcttggtagtgtagtaattcttttaaaccaagagtcagtaatagctgatcctgattacgaaaataccattcagacaatttttctaatgcttcgaaaaatttcccactttgatcctgcgcggattcattactatcagatacaaaatgtttcactctaagattaaagtacgcatcaaaatagctaatatgaatggcaatcgcgcgacttggaccacctttatcaaaataatgactgtcttcaattgtgtaatcgctaaatccctttgaatcaggtgctaaataaagatgctcatcgctataaaaatcatctatcttttcagcataattagcaacattttttttcgcttgaaaagcttctctaagcaaaattttattaggtacatctaaaactctgaatcttccctgatctgggatgactgtcagtgcactgtttgggatggctaaatctttcactttacgcgaagaatgtgcgttaaatatataaagttcagcctcgaaaggagcttcttttgccacgatttccgccatttttacgctggaatccgtactcactttccattcaaaacgtttttcagtaaaaagcttggctgtgcctacttgaggatttgtgattaaatagcaaacaaacttcttttgatcaaacaattcaatcgtcttttttaatgtaggtgaatcacgaacaggttcgataatcggccgaatttttttcgaccagcgtacttctttaattaaagtattaaccgcaagtaggtcaaattgcttgccacgtaaatagggataatacataggctcactccaatggttcagtcggacgacgccgaacctgtctttgctgacgtaaaaactcataatcttgctctaatgcccgtaattcttcttctaaactttcgatgcgagctgcttgcacatcttcaatgaagcgctgatagtaattattttcctgtaggctatccttttcatccaagcgtcgccgcaactctttataaagctgttctgtcgaaaaaaagcttgtgccatatgacatgcgcttcgctttttggacctcgcgaaacagcgaagccatgaaccgttgagtaagagccgtttcttcaacttgcaaggctctttttactggtttctttgcaacaaagaacgtgccatcagcaggaagttcatccgcctgtgtgtatggtcggtaaactaagactccaatctcacttggaatgtcctctagtaccttcaaatacaattcttccgttaaaacaaaataattgtaatgcccaacaaaagaaagttttgcctttgaataaaaatcagctcttgtcaccttaagctcatagcaacgccactctgtagtatttggtttaaaaaaacaagctagtgtatcgacaattccttgatcatccggcattgtgacttcttcaacgacgatgccaccaagttcaatacaataataataaagtgccttctcgatttcttgtgttaatgttgttttcatcttctcaccatgggaacgtattttcgtaaactttagcataattgtactaaaaaaaacagaggttgccctctgttttaaataaaatatgaaagatcactagctggacttggataggcgaagataaatttttcaatttcttcatgtgtcattttctttgttaaagcgatcaagagataattgatgacttcatctgctaattgacttaaacaagttatagcagcgattttatcttcttcatcatagacaaacttgatttttgccccttgatcgttgattcgctgataagtgtaccagctggacaaatccattgtttgtgaatggtatttttccggatgagcagtaagctctctttcgcttatccctaatcttgcaagacgttgatctccaaaaacgatcgtcggaatcaatggatatttgatcgcttcagcggagtccgccatagctttgacaacataacctgcttcaaaacttgctacaggagtcagctttggttgactcttcgctacaacatctccgcaagcaaaaatatttttttgtgtggtacgtaaatgatcatcaacttttattccttttttatcataagtaacaccggctttttctaaattcaaagcctccatgtttggtattcgaccagtggcaccgaaaactctgtcagtgatcagttcaaaatcttcacccgtgatacgatattgcgggtgattcaattcaattgcttttgtatttacattaaagtgaaaatgaacgccctctgatttcatatgctctactaaagctgtcaccagttcttgatcaaattctttcaatggacgatcattgtgatgaataatatgaacctctgatccagtagcactagcaatcacggccaattcgaaagcaatataccctgcaccgataaaagcaattttttcaggtaagtgttctaaagctaaaaaatccgtactgctttgcagcaagtcctgtccatcaatcggcaacacggatggccgttggcctgttgcaatcaaaaattgatcagatgctaaaattttatcattaacgatgatttgatgagcatcaataaaactggcctgacctgtataacgatcaatttcagctgcatctatgccatctttagtattttgcggaacactgtctgtatagcttcgcttaaaggacatcaaatcttcccaaatgattttaggtgtttgttcaaagcctttgccaaccattgtctcgattcgtttttgcgcctctactccgctcatcagcatttttttagggtcacaaccacgattagggcaagtaccgccccatagatccgattcaataattgctacttttcttccctgctccttgaaaccgtaagcagcggaatttccagcaggaccgctgccaattacaatcacatcatatttttccattgttagtcctccatattctcatgccgcataccattttgtttcactcaaacttaaaaggtgccgtaatatattattagccggcttcttgacttaaataacggaacacatcgctccgattaatgatgccaattattttgccattttgcttcattgcaaaagcatcatgctcggctaatagatcaaagacttcgctcaagctggtattaatagataatgctaataactcagaggctgctgtttctgatttttgataaaagccaccattatataagacttctaatgtgtgtgtatacacttcatccgtcgtttcatcaaagaattcttccacaaattgattggctggatgtttttgaatctcttcaggtgtatcacactgaattaattttccttcgtgcatgaccgcgattcgactgccgatcttcattgcttccttcatattatgagtcacgaagattacggtattacctaacttttgatgcaattctaatacaaggtcttgaagacttgcgcgtgaaattggatcaagtgcgctaaacggttcatccattaagacaatgtccggctctgatgccagcgcacgaatgattccgatccgctgttgttgaccgcctgagagctcgcttggcatccgatctctaaattgatcaggatccatatcgacctccctcaatagttggtcaacacgtttattgcgtcgttccttatcccagccgagcatgtcaggaatgacttcaatgttttccttaacgctcatggtaggaaataaagcgatctgctgtaaaacatagccaatctgccagcgtagcttctgaatattgtaatctttgattcgtttttctttaaagtagagattcccgtcggtcggttcaatcaaaccattgatcatttttagcgaagtcgtttttccacttcctgaaggaccaactaagacaaaaatttctccttttttcacttggaagttcaaatcctttaagacaacattgccttcgaactccttgcttacatctttaaattcaataattgattccatttatttctcctccccaatgattttttctttcaccaagaagtcatgggcaactttagccggctgttcctttttcacattcactagatagttcatttcgatcatttgatcttcagtaatcttgcctgccaaacgattcaaggctttgacaatgtcgggatgtttatcagcaaactccttcttcatcaatgcagcaccttggtatggtgggaaaagatgaagatcatcctctaaggtcaccagatcatattgcttgatctcactatccgttgagtatgcatcaatcacatcgacgtcaccattattgattgcttgataacgcagtgcaggttccatactttgaaccgaacttaatttcacgccatatttatcttgaattccacgataaccgtcttgacgatcaataaattccaaagtaaagccagctttcaattgatcttgttgtccctgcaattgagaaattttagtgattccacgtttttctgcttcacttttcttcatcgctaaagcatacgtgttttcataatccatgggttttaataaacgcatatcaaattgcgaagctagtaatttgtttgcttctttgtacgtcttttctggtgataaattatccggcgtgcttttaggaaccttgactaagctttctaaaacggtacctgtaaattcaggataaatatcgatttgatcacttttcaccgcgctaaataagaaactggtttttccgaagttgggctttaattccacattgatcgaggaatcttcatccttgataacttccttatacatattgattaaaatgtctggttcagaacctaatttcccggcaattgttactgtctcactgccaattgggttgttttgagcgaaaaagattccgccaatgcttaaacaaataactccaagagtgatcagcgttactttcccgcttcgattttgtagaaaacggatcaaggtactgaaaatgatggctagtaaagcggagctgatggccccaattaacgtcaagtttggatcgttacggtcgattcccagcaaaatgaaagtaccaaggccgcctgctccaatcaaggctgccaatgttgcagtaccgatgattaagaccaaggcagtccgaactccggaaataatgactggcatcgccataggtaattcaactcgcatcaattttcgcatgtgtgacattccgaaagcatcagccgcctcttcaattgatggatcaatctcagccaatccaatataagtattttgaaaaatcggcaataatgcataaactactagggcgatcaaggcgggaactgtaccaattccaacgaagggaatcagcaaccctagtaatgccaatgacggaattgtctgtaaaatactagtaatttgtaaaacgacctcggctaatttttttcgttgactcaataatatcgccaacggaatcgcgatcactatggcaatcaacagagcgcttaaagagatggctaaatgctcaaagatcgccgatagcagatcgtcttttctttcactaaaggtattaattaattcattcataaaatatcctttcaaatttatgacttgttctcattataacttaatcaaaaacggagacaaaaagatcggctcgctcaaaaagtagtataataatgattggaaattattcaggaaataatagttctgattaaacgagagaatgcctaagatttggcacaaggaatgatgtttaataactgtaactgaataatttgaaaaagaaagaaggagaaaaatgaaatcaattgatgaattaaaacaaattcagcgtacaacccaagaaaaaacttattcttatctgaattctcaccattataattggtttaaagcaatagatttgaatttattgaatagcgatggcttcaccaattattttttacgaatcaaacaaaatgaaccagaaatttttgaggaattacaggaaaaagtactgaatgcgacaattacgagctttaaacaaaatttgtctgattcggatagttttgttctggtgaccgcctcctgggcaaatggttttgttcctgaaaatgctgaagcagcgatgcaggaccttgatcgttatttgaaacaatacactattcaaaaagaccccttgattggaatcaatcaaatgaatgcagatctaaaccaagtcttgatgcagcatcttccaaaagttcggcgacaggatctgcgcttgatttatcggctgcttttattaaaagaagcttcggaaaaagacgttcagactgaactttcgtcattaaatgatcctactaaaataagaactacggccgctctaaaactttttcgaagcttctaaagtaaaaagaaacgacatatgatggtcgtttctttttttcttacttttctgccgaagctatcatcacatgccactgttttagctcatagcgataaagtccgctttgaatgactgggtccgcgtctgaaatggcttgcgcctctgctaaattttcagcttcaaacactaccatggctccatcgattatctccgttgccatatcgccaaatactccagcagttagataacgtcccttcgatagttgttttaaataagctgcagaatctatcgctaccttttcaatgaccgcgtcctcactatttttgaagtcaatccgaacaaataacatctttcccgatttcatttcattatcccctttctataataaatagttattttctttattggctgcctgcaatcggtggagctcgtatgtagcataaccgttaacaattaagggttctttttgacagattgcttcggcttcttcatagctgtttgccttcagaataaacattccagccattcctgggtaacccttaaacgctccagctagttcgattgtgccttcttcatcaagttttcttaagttttcgatatgctcagtaactcctgccttatttaaacggcgatattctttggttttcttaatcaacatgacatatagccattcctccattagttctcctccttgttatattgctgagcaattttcaatgctcgttttttaacttcttctcgcgcttttaatggttcaagtatctctacataaggtccgaatgaaagtaaacgatgatacgtccattcgttcagtggatacctaaccgtcactaaatagctatcatccgaacatcgcttcacttcatcttcatgaaactcatcaaataaacgataagccatttctggtaaaaatcgaagcttgaaaaatacgtattcagtattgcagtcagaatgagctaaagaaaaatcttcaggtagtgttcggtcaaaattttgttctaaaacatgtatccttttcatccgggacaatcgaaaaattcgtatatcctgtttatcgtgacaatagccaataatataccaagcatgggacttaaagcttaaacgaagcggttccacttttctttcagatcgttgcaaatcagaattgaaataatcgaaggctagaatatatttttgagtaatcgctcgacgtaattcagagatcgtgattttctcgtcctcactgcttccccaataactaaaatcaatttctagccagtcatcagctggcgcctgattaaaaagtgcaccgattttcgttagcacttgatccgcctcagggtaatttgatgcttgcaaaatctgtagaccttgataaatctggaattgttcctcggtcgtcaaaaacgattcatttaagctgtatccatccatcaatgaaataccgcctcctgcgccctttttcgaaataataggaatgtcagacaagctcagagttgtaatatcacgataaatcgttcgcctagagacaccaaagtaatccgccaattcttttgcagtaacttgttttcgattaacgatgtaaaaaatcattcgtactaatcgttcaatctgcataatgctccttcctttcgcttaaaactatactaatactaatgagacaataagctgtcatattaaaaataaaaaaacagaaaaaacactttcaatcatgttttttctgttttatttcaatcgaataatctcgcgctcaatcagtgcaagggaaagttttaaggctttaactcgttcctttgacagcgtaatttgggctttcacatttttacctgcagtttgcttttcctctaatgaaatgattgcctgctcaattttatgcagtgttgaagctagcgacttcttcgcagccaaataatcggccaattcataatcttccaagtgcattcgcctccttagttcaattatagcaaaaaaaatctcctctcaagaaaagaggagacaaatttctagatatattaacggatgcctagtgcaattcgcgcgtaacgactcattttatccgttgtccacgctgggtaccaaacaagttttacttctacattggtaacttcaggaatctcagccaatgctgattggatattgtcagtcaggatatctgctaacggacagcccatagtggtcaaagtcatcttgatgacagtattcccagtctgttcgaaatctacttcatagattaagccaaggttaacgatatcgatacctaactcagggtcaatcactgactctaaagcagtcaaaatagtttctttaatttcagctatttctgcatcggtccatttttgtgtgttctcttccacctgctccactcctttcgagtttcaagaagtattttactctatcttgatgcttttgtaaatgagaattgaagcctgttcattctcatttaagaattgttacttactattttgtgacttcttcaattgaagttgttcatcttgtgttaagaaagtcccgacaaccgaatctgtagctacgatattagtgaaggactgagggtcaacatctgcaactacctgcttcaatgcatataattcataacgggtaaaaacaatcataatcatttctcgttcactagaactgaaccctccacgtgcttgaatgacagtcattcctcgtagaagttcagtatttaaagccgcccgcatgtcagcgcttttacttgttgtaataaaagcagtcattttttggtgactagtatgaacataatcgacaaccgtactcatagtaaaaatcgtaatgatcgtatataaggcgctttcccaggtgaaaaagaagcctgcaacaaccacgatgacaccatttaaaagcatcatataatttccgacagttcggccagtcgtttttgataaaagcaatgaaacgatatccagtccgcctgttgtaaaaccaaattttaacgataatccagcgccgattcccaacaatacaccaccagtgatcgcattcatcaatacattatccgtgacttgaccagtaggaacaatcgtcgtaaagaacgacatcgcaatcacattggcgaaacttaaaatcattgctgactttcctaatttaataaaccctaaaatgaatactggaacatttagaagaaagattaaaatcccagtatcaatggataaaccaacatttgagagcaaatgctctacgatttgggcaatcccagtcatacccgcagaaaaaacatttgctggaattaagaaataatttagtccaacagcaccggtcagacctgtaaataatatgacaaggattttttttgttaaatcctttgatgtataattaataaccttctgcatccatgattcccctttcatttaaaacctctaatagaataacaggttctctcatcaataatcaatctttttccataatagattggagaataattatggctttcttagcaatttttgataaactataagaaatggattggaatgtccaaatgtaggatacacggcattcgaatccttaggaaaaataagcagctaaagcaaacaaggaggatgtctatggctaaagatgcaagctttgatattgtttcggaactgaataaagaggaagtcaaaaacggtgtgcaaattgcgctaaaagaattaaagaatcgctttgattttaaaggtagtctctttgacattaagctagaaggaaatcagttagtcataaaggctgaagacgaatacaaagtggagcaagtcaaggacgtacttttcagcaaactaattaaacgcggtgttcctttgaagaacattcagttttctgcttcagaacacgcgttaggcggaaatgctcgccaagcagcagaattagtaaatggaatcgatagagaaagtgctaaaaaaatcacgacagcgatcaaaaacagcaaaatcaaagtaaaagcacaaatacaagaagaccgactgcgagtgactggaaaaagccgtgatgatctgcaacaggtcattgcattagtaaaagatatcgaactaccgattgacgtacaattcattaattaccgttaaaaacggttgtgacagatgggggcagcttcacgaaatttcgacttatttttcaaagaaactatttctggaacatacctcaacataccgcttattcagaaaaaggagctgtgacaagtcttttgtcacagctcctttgccttatttgaagctaattgctggttgttagggaattgtttggtatttcgtttgcgatatttttatcaatgatcaagattgaagagaataaatttatcgctagaatatttattccctttcttgccaaaattcgcgtgacgcatgttctacctctgttgctccgtatactatttttcgatctgaccagctaactggcaacagcttttgatagtgtggattggtataacgctgatcgagtaacaaaatgattccttgatcttccattgttcgaatcacacgaccagcagcttgaataaccttgttcatacctggtaactggtacgcatagctaaatccttgattgcgtttctcatcgtagtattctttgatcaattcttgttcatggttgacttgtggcagtcctacaccgactaccacggttccaatcaaacgttcgccaactaagtcaattccctctgaaaaaatcccgcctaacacgcaaaatccaatcagcgttctctcaggctgatcgacaaatgcggccaaaaaatcctctctttccgcctcattcaactttgaaccctgaatctgaatcgcatattctggataaacgtcgtggaaataatctgccacctggtctaagtattgaaaggatggaaagaaaacaagatagttgcctgtttttgtttttaccaatcgttctatagacgcggcaattttgggaatactttgagtgcgcatttgataggtcgtttggatactggcatctaccaagactaaacgattttcatttggaaaaggacttggcaaacgataggttaaactatcctcacctccgcctaaaacctcttgataataatctagaggtgaaaaactagcagaaaataagatactgctaccgaccttctccattgtttgctctaaaaaccaagaaggatcaatacaatactcttttacaatcaaatcatagctcttatgttcaacggttgtttgatagtgatcgtcgtagaattcgctcatccgcgtgaaacggataatttcaaaatagactggcagcattttctgctgcgctggatgatcggggttttctgccagccattccttgatctgttcttgtaatttaaacaaactattgatcaaactttcaggagcagcctgctgatggtgataggccttgccctctagcgattgatggattagttcaaactcattatcaactctggtaaatgctctgttcaattttttaaaggatttatctaagtctttttgcatctgcgcgatattttccctagaaatactagccgagtacatttcttttgaacgattgactagattatgagcttcatcaactaacactaaatttgttttattctcttcttcaaagaaacggcgcaaataaaccgttggatcgaatagataattataatcaccaatgaccaagtcacaaaaacgactaatatctaatgacaattcaaaaggacacagctcatgctttcgggcgtatttttcaatgactggacgtgtatattgatcatcattgtttaacatatcccaaaggccgtcgttgacccgatcataatatcccttcgcgaaggggcaatgctctggtgtacagttgcgttctgttaaaaaacaaatcttgtccttggccgtcaatgtgacgctttttacacgagcgtcttttttcgtgattttcgtgactgtttcttctgctacctgacgggtaatagttttagcggttagataaaaaatccgctcgcctaattcttcacccatcgccttgaatgtcgggaaaagagttgacatggttttgccagttcccgtcggtgcttccacatacagtttttgctgggcatgaatcgttttatagacagccgcggccaactctctttgacctgctcgataggtatcgaatggaaatgctagtgactttaacgagttattacgtgtttctcgccattgcatttgaaaaactagccagttctcatatcgctcaatcaagtcattgaaaaaatctgtcagttcttcaaagctgaaggtccgaagctgacgcgtgatcttttcttccgttgtttgaaaataggtcaaacgcgtaccgatttccgttaattcttcttgctcactataaatataggcataaaccatcgcttgatagaaatagagatcgataattcccgtctcaagctcttcaaagggggtttccgaagttttaatttcatcaataattattttatcatcttctaaatagataccatctgctcgtccttcgatttgaacggcagtttcagcaatctcaagtggctttttcaaccaaacctctttttggtagccttcgcccgcttctttttgcaattgacgatgaattcgggcgccttcttgaggtgtatgattactgttttttccttcatcaatactaccgcgacgcaagataaattcaacgagttcgcgaatcgctatttttttgactaccatacacttacctcattcttcgtttctattcaatgattctcaaaatcattttgctgtttcaccatagaagattttcaatcactcgtcaagttttattgatacttcttttttatcaatcgctttatatggatagaaatgaatattggaagctcttgatttaaatccatactcgtcactctcattaaaatgattcacaaaaaacctgattgaaatgtcaaaatcggtcagaggagccgcaatttttttacttttaaggtataatgaagaaggaattcgtgattctaagtttattgacactcattttgagtcagcaatagtgaatcgaatcaagaaatatacttttagttttcagggggaaaataaaaataatgattcaaatcgaaggttttgttactggaatcgcgcaagaaaattgctacttgattcataacgaacacaatttattgatcgttgatcctggctcagagggggatcgcttgattcaagaagtcaaacgcattggaaaaactccgcaagctattcttttgacgcatacgcattatgaccatattggtgcggttgaacagctgcgaaataactatgagataccagtatatgtgagtccactggaacaacaatggctaggcgatccaatcttaaatctttctggacttgggcgccatgataatatgcccgacctgatcgttcaaccagcggaatacgaatttgaaatgaaggagtatacaattggcgatatgacttttcaggttgtaccgacaccaggacattcgattggcagcgttagcttcatttttgatgatttcgtggtagttggtgacgcgctgttcaagggaagcatcggacgcacggatctttataccggcgatatgcagcaattgctctacagtatcaaaacatatctcttcactcttccgcgggaattgccagcttatccagggcatgggcctgcaacgacgatcggtcatgagatcgatacgaatcctttctttaactaatcaactttttggaggttttaaatatggcagaaacaaatctttatattgttcgacatggtaaaacaatgttcaatacgttggctcgagtgcagggctggtgtgacactccccttactcagagcgggcgtgacggcattcactatgttggtttgggcttgcaagacacgaagtttgaagaagcttattccagcgattcgggtcgagcaatcgaaaccatgcgcattcttttgagcgaacatcctgacggaaaagatattccttatcacgttgatccccgtattcgggaatggtgctttggttctttagaaggtggttttgatgcagagatgtggggtgttttaccacgagtattgaacttcaagactgaagatgagctttttgcaactgaagtaacttttgaggaaatcgccaatgccgttttcgctgctgatacagcaaactgggcagagccttatgaaaagctgcgtgatcgtgtatggcaaggttttgaagatattgctcaacatcgggaaaagcaaggtggcggaaatgtcctcatcgtttctcatgggttgacgattgctttcttattaagcttaatcgattcaaagcagccggttcgtgcaaacctgcttaacggcagtatcaatcgtttgcgttacgagaatggagaattctccatccgcgcaatcaatgatatcagttatatggaacgcggaaaaaccatctcagatcaaattgacgaatagaaattggaactgtcgatatcttatcggcagtttttttcttataaaaagcttagccttttttcgatggtctttttaaaggtgaaacggtatactaatgattgttattaatttgaaaggacgtaaactatgcttattgccaatatttttaaagcaattattcttgggatcgtcgaagggattaccgaatggttgccaatttcttccacgggtcatttgattttagcagatgagttcatcaagatgaatatgagcgctgcttttactgaaatgttcaatgttgtaattcagttaggcgctattttagctgtggtggttttatatttcaataaactcaaccccttctcatctagtaaatcgcatcaggaaagaaatgatacttggacattatggttcaaagtaattatcgcctgtttgcctgctgcggtgattggattgccgctagatgattttttagaggcccattttcacaaattcttaccagtagcgatcatgctgatcgtttatgggatcgcctttattgttgttgaaagacacaataaaacaaaaacacctaaatgtaccaatttaaatgattttacctataaagctgcattgattgttggagcctttcagctgctatccttgattcccggaacttcacgttctggagcaacgattttaggggctatcattatcggaagctcacgctttgtagcaacggaattttctttcttcttaggtattccagtaatgtttggtgctagtggattaaaaatcgtcaaattcttgttgaatggaaatagctttggtatttcagaaatcgttgttttattagtcggtatggtgactgcctttgttgtttcgatcattgctatcaaattcttgttggattatattaaacgaaatgattttaccgtttttggctggtatcgaatcgttctaggaatcatcttgatcggctattggctgattgctatgtagtatctaaaatgaatacaaaaaaagttccaggcttgaaacattgagcttggaactttttttgatttattaattaaacatcgtatttaatgtgaaatcatttgcctatttctatttgcatagtgatttctcaacaaggttaataatactaattataaattggaaacaaaaagaaaattttcttcacatcgttgatatgatagctttcactagcttaattactaatgatagtcattctcaaatctaattgataattactttcgttctcaattagcggattttattatcatttatctaggctgctgtgttactataatggtgaggatagctagtgaattaatttcacagcttacaaatacgaaaggaggaaaagtgatgagtaaaaaagaacgaaatgcttttctctctacccttttctgtttagtttttttaattattggaaaaatgctgattgcgctttcccaatcaatctatccgctcttttttgtcttggcgatcattagcggtggttggaaacagacctatgaaggactcagtgaattaattcatgaacgtacgttgaatgtcgatttattaatggcgttagcagcaatcggtgcctgtttaattggaaactggtttgaaggagcgatgctgacctttatcttctgtttaagcggtgctttggaggaatacgctactaacaaaagtactaaggaaatcacagctttgatgaatgtagctccaaatgaggcgataaaaatcgtcgatgaaaaacacattacgattcctgtcgaagaattagccattggtgattttgttttcgtaccaaagggccaagcaatcccgatagacggtcgcatgctatcttcttcttcaattgacgagtcagcaatttcgggagaatctgttcccgtagaaaaatccgtaaatgatgatgccttcagcggaacgattaatctaggtcaggcttttacattagaagtgaccaaaaccagcgatgataccttgtttgcccagattctgaaattagttgaaaacgctcaaaatgaacaaagtgctactgcaacgttcattgaaaaaattgagaacgtttatgtgaagatcgttctgatcgcagttcctttaatgattctattgactcactttgcgcttggttggagttttacagaaagcttctatcgcggaatggtgctgttagtggttgcttcaccttgtgctttggtagcctctgctactccggcgacacttgcagcgatctccaatggtgcaaaaaaaggcatcctgttcaaatccggaaaaacccttgaaaaattagctgaattgcgagcaatctcctttgataagacgggaacattgacccaaggaaaaccaagagtaacagattacaaaacattttctgatgaacctgtcatcccacaattattttactcgatggaacgacaatctactcatccattagccgttgcaattaccaatttctttaaggatgaaaaaacgctggaactacaggtggaagaaaaggccggtttcgggttacaaactacctatcgcggcgagacctggcaattaggaaaaccaatgaagaatcagcagcatcccctcgttgaacaatggcacaacgaaggtaaaacagtcgttgttcttagtaaaaatgaagaaatcgttgcgcttctggccttgatggatttgcctaaaccatttacctctgaagtaatctcctactttcaggaacaagcagtcgaaacagtaatgcttactggtgataatcttggagcagcgaaatatgtcgctcaacagttaggcttaaatgattatcacggcggctgtctccctgctgataaaaccgagcttgtaaagcagcagcaaaaagaatataccatcaatgcgatggttggcgatgggattaatgatgcccctgctctcgccactgctagtataggaattgccatgggagaaggaacagatgtggcaatggaagtttctgacatggttttaatgaaaaatgatttgactaaactgatgtacagtcatcgtttagcgaagaaaatgagacgaatcgttcggcagaatattatcttctctttatgtgtaatcgtcttgttaattgctagtaattttcttcaatttctcacccttcctttaggagtcgtgggacatgaaggaagcaccattttagtgattctaaatggactacgaatgctgatgccattaaaggaacctgtcagcttggatgaaacaagatgcagctcttgcccgctttataaggcagaacattagaaagaagcagaatcgattccgattctgcttcttttgagccctgcactttgtaaatcatgaccagaaactaacataaaacaatttcctttattttctgttaaggaaaaaaacttgtcacgattttattgcattaaaaagcggctttatgtataatgagtaatgttgaattgtacggtattaaccgtataagactgaattcggaggtgaaatccatgccaaacattgaatctgcaatcaaacgtgtccgcactagcgaagctgctaacgctaaaaactcatcacaaatgagcgcaatgcgtactactgttaagaaattcgaagaagctgttgctgctggcgctgaaaatatgaacgacctttacaaagaagctgctaaagcaatcgatatggctgaatcaaaaggtttgatccacaaaaacaaagcaaaccgtgataaagcacgtcttgctaaaaaattagctaaataataaaaaccgatcgtttgatcggtttttttatttgttcttataaagatgaggttgtgacagaagtggtcagcttcaagaaataagaaggaatttccgaaaattgtttctcaaatttttgtgaaatttcggcttatttccgaatgctagttctgcttagtgaaacttagcagtaactgtatgcggagcttgcgtagaagaagctacttctggaacaccgtttattcggaaaaaggagctatgacaagtcttttgtcacagctccatgctttatttattcgttagttcttcataacttttcacgcgttcttccatatcttcaactgtttgattcaacatctctgctactaacgtttcatctttctttatgttatgcaaagcagagaagcgagtctgaccttctaagaattcattcatcttgctgaagtccgttttcttgaagtcgatgcgcattggatctttccctttttgtgcacgaatagggtcatagcgataaagcggccaatagcctgattccacggcttttttagattcttcgattgatttactcataccaccgcggataccgtgattgatacagggtgtgtatccgataaccaatgaaggtccgggataagcctccgcctcttgaattgcttttaaagcctgtgttggattggcctcgatcgcgatttgcgcgacataaacatcgcgataagtcattgcaatcatcccaagatcctttttctttgtcttcttaccgccggcagcgaattttgcaatagctgctgatggtgttgctttcgacatttgaccaccggtattggcataaacttcattatccattaccaaaatgttcacatcttcgccagaagcaagaacatggtcgattccgctaaagccgatatcgtatgcccaaccgtctccgccaatgatccattgactaggtttagcaaacatttctctgtcagctaaaatagactgcaactcaggatctgtttcttcacttaatactgcgcctaatttagcagcacgttgctgacttccttcgccttctaacatatgatccagccagtcctgcagctgtgcttttgtatcttcagaaccaagaccttttgctaaggctgaggtaattttatttgctactcgatttcgtttagtttcattcgccatatgcattcctaagccatattcagcattgtcttcaaatagcgagttactccaagccggaccgcggccgtcttgattaactgtatatggtgtcgctggtgctgaaccgccccagatagaagaacagccagtcgtatttgcgaccatcatccgatctccgaacaactgagtcaatagcttcacatatggtgtttcaccacagcctgcgcacgctcccgaaaactcaagcaacggctgttcgaattgagaacccttaaccgagaatttcttcgctggattctctttttgacgcagagtcattgcgaatgcccaattcatcgcttgttctttttgttcctcatatgatctcatcactaaagccttttctttagcaggacaaatttctacgcaaaggccgcaaccagtacagtcctccaaagaaacttggatacggtattttaagccgtcttttccgcgcatatcacgggtaatgaagccttcaggagctgctgccatttcctcatcatcagcaagaaatggacgaattgccgcatgcggacagataaaggcgcattcattacacattgtacatgcttcaggaatccattcaggaacttccaaagcaattccgcgtttttcataagccgctgtaccagatggcattacgccgcctagcatgccgttttcgatcaggtcattgacagaaagctgatttccttcctgacgattgactggttcaagaatattgcggatgtaggcaggtttggtttgatcaccgccgctaaatagcgccttgccttcaacttcagcccattcatctggaatctcgatcttcttcaattcagcgacagtcgcatcaatcgcctgccaatttcgttcaacgatcgtcctagatttcttcccataggctgcatctacttctgccttaagcagtggcaaataggtctcgtgatccatgatatccgtcagctcgaagaaagctgttgacatcacttgattgatccgtccgcctaagcccgttttttgagcgatatccatcgcgttgataatatagaaattaattttgtggtcagctaaatagcgtttgaggcgatttggcaataattgcttgaccttctcttcatcccaaacagtattcagcaagaaggtgccgccatcttttaagccctttaataaatcatattgatggatataagcgctattgtgacagccgacaaaatcagccgcttctacattgtaagtcgaaaggataggttctttcccgaaacgtaaatgagaattcgtcaatccgcctgacttcttcgaatcgtaagagaaataggcttgtgcataataatcggtattgttcccgataatcttgattgcttgcttattcgctccaacagtaccatctgatccaagtccccagaatttcgcttggaaggtggattttggtgttaaatctagcacttcgctcattggcaaggatagatttgttacatcatcaatgattccgatggtaaatcgttgcttcagctcagcagctgggaatagcaaatgattgaaaacagcgacgatttgatcgggtgtcacatctttagaagcaattccgtaacgaccgccgataacgattggtcgattggtatgacgataaagaacactttgtacatccagcaataaaggttcgccgtctgatccaggttctttcgtccgatctagaaccgctactttttcaaccgtttctggtaatttctctaataagttttctgctgggaatggacgatataaatgaatatccaaaaagccaactttacgaccgttagcattcaaataatcaaccgtttgctgaatcgttggtgaagccgatcccatcgcgatgatcacttctgttgcttcaggatcaccgtaataattcgtcagatcataattcgtaccacgcagattgttgatcttgttcatatacttttgcacaatcgcaggcatttcatcataatagcgattgaccgtttctctttgttggaaatgaatatcgggattttgagctgtacccgagacatttggacgattagggttcattcctaatcttctaaaattagctaaagcttcccagttcatcatcgccttcaaatcatcgtagtcaatgacttcgattttttggagctcatgacttgttctaaatccatcaaaaaagttcatgaagggcagtctgccttcgatacttgctaagtgtgccactgcagatagatccataacttcttggacactgccttcagccagcatacaaaagcccgtttgacgagccgccattacatcactgtgatcaccgaagatacttaatgcattggtagatactgcccgcgccgctacatggaaaacggtcggtaataactcaccagcgattttaaacatgtttggaatcatcaacagcaaaccttgcgaagctgtataagtcgtggttagaactcctgttttcaaggaaccatggaccgttccagcagcaccggcttctgattgcatttctactactttaactgtctcattgaaaatattcttgcgaccctgttctgcccactcatcaacgacttccgccatcgttgaactaggagtgatcggatagattcctgcaacttcagtaaatgcgtaggatatatgcgccgctgctgtatttccatccattgttttcatagttttcatcatttgcacctcgcttaaaccaattgctcctgctttgtcttttgaatgtattgatcaatctcatttgctgcgatttttccagcacccattgctaagataacagtggctgctcctgtcacaatatctcctccagcgaaaacacctgggatcgaggttgcacaggtttcttcatcagcatcgatgtatccccatttattcagtgaaagctcagggaacgtatctaataaaaccttattcgccccttgtccgattgcttcgatagcagtatctgcttcaataatgaattcactgcctggaatgacgatcggtcgccgacggccagattcatctggttcgcctaactccatttgaacacatttgacggcttgtaatcgtccattgccatcatctatgtattcgattggattgcttaaccaatggtattcaattccttcttcgactgaatggtgatactcttcctcacgagctggtaattcttctaacgagcgtcgataaacaatggatactttatctgcacctaaacgttttgctgaccgtgctgcatccatcgcaacatttccgccaccgataacaacgacattttttgatttttgaacaggggtatcgtattcaggaaattgatagccatgcatcaaatttactcgagttaagtattcactagatgagtagactccgtttaacgaggtccctttgatgccttggaatcttggagcgccggctccaacagatagataacaggcatcgaactcatcaatgatctcgtccatagtaatcgtttttcctacgacgacgtttgtttcaatttttaccccttgtgcgacaattcgctcgatttcctgcttaacgattcgttttggcagccggaattctggaattccgtatgtcaaaactccacctggagcatgtagcgcttcatagacagttacatcgtagcctaatttcgctaaatcaccagcagtagtaagtccggaaggtcctgagccaatcactgccacacggcccttatcactattgatttctttgtattctaatggttgctccaaggcccaatctgcaactaaacgttctagcttcccgatggccacgggctcaaacttcttcgagcgccctaatcgacaaaccatttcacattgtttttcctgtgggcaaacgcgcccgcagatcgcaggtaaattcgtataccgacctagaatttcgtaagccagcggcatatttccttcttcgattgctttgataaaaccaggaatatcgatcattacaggacatcccgtaatacagggagcatttttacattgcaaacaacgactcgcctcaagttgtccttcttccaaggtatagcccaatgccacttcatcaaagttttgattgcgaatctcaggggcttgctccttcattggcgtttttgtataactgcgtttagccatttgaactcacctgcttttcatatctttcgttagccagtaattcttctggacgatattgctgcattcgattgacaaactcatcccaatcaacttcttcgcctaaaaattccggcccgtcaacacaggcgaatttaatcgaattatcaacggttacacgacaaccgccgcacatacccgttccatcaatcataattggatttaatgaaacatagatcggcacctcgtatttttttgccgtaagcgtacaaaacttcatcataatacttggaccaatcgcccaggccatcgaaattttttcacgtttgaaaacttcttccatggcatccgtaactagccctttttgtccaactgaaccatcatccgtcatcagaatcaactcgtcggaatactttccgcaatcttcttgaagaatcaataaatccttgtttttcgctccaagaactgtaattacccgattgccggcttcctttagcccttttacgatcgggaataatgctgctatcccaacaccgcctcctactaagagaacggtaccataattctcaatatctgtcgcttttcctaagggccctacaatatccgttaaagcttcaccagccataacagtcgcgagctgggctgtcgatttgccgatcacttgaaagattaagcgtacccaacccgcttctttgtccgtatcaacgacagtcagcggaatacgctcaccattttcgtcgattcgcaagatcacaaactgccctggttgcgctttactggcaattcgtggtgcatcaactaaaatttcaaactcagttggtgccagttccttgcgttctaatactttaaacaaatcctcactccgttctttcaatgtgattccttattccgctgcttcaatcagcgttttaacgaaagccttcaatacttcttcatcatcatcgtctgcttcattttcgattttcacagtttctgctgctttttttgccccagttttagcaaaggcttcatcgaatgcaatcgctgcatgacagaaataatctggatataattcgctgtctccgcttcctacaacaccataaacttttcctgatagatcttcctcttgtagttcttcgtggaagtcttccaaatcaaacgggatctcgccatctccatcagtataggtagctaggacacagatatccgcatcttcataaaaatctgcttccgcatcatcagcgtcaacgcgttcaacgtcaataccgttcgcttcgaaagcatcctccagaatttcagagattccttctgtgtttcctgtgttagttgcataaacgatctttgctagtgtcattttgttcatccttccttcttatctgattttggataaataaagccaataagatttggctattattccttaaataatgaaagcccttttttgcattttggaaagaaacttcaaaataaatattagaagtttgccactttaatcataactcaaaaccgtgaattaatgaacatctcattgggatttttattcgttatttttttaataaaacctgtttttcgctggttttttgagttctcaagactctaattgagaaagcttttcatttagcggtatatttttattatcgactgctaaaaatacgcaaaaaccagcctgtcaaaattgacctgctggtttaataaattggataattatagaatccaattgagaaaaaattctaatttttgatgcgttctgttgattttaaaataaacaactgaaaactcaattctttctcagcttgtcccgtttttacctcataatcattttccaccaattcatcgtacatagacacgagtaaatccaaaggaaatttggctacctgctgcatcgccagcttcacacgataaggatgtacacctaaggtctcagcgatattggcctgctgataaccgattttttgcaaaatttttgtttgtaagagcaagcggatctgaccaatcaagatggcggtcaatttgatagtctcctccccctgaagatggagctcttcgtaggtttgataggcttttgctgtatccccttttaaaatctgttcagtcagttcaaaaatattgtgttccaacgttttaggtaccaaatcttggaccaattgaagggtgattgttccgccttcgcctgcaagcaatagcagcttttcaatttcgttcatcgcctttgaaagatcaaaatcagttaagcgcaagaataaatcaaaggcttcctttgaaatctttacttgttcattactaatgtaacgctgtaaaaaattgcgcaaatctctttcttgtaatggtgctgcatcaatcaccgtggtctttttcaaggccttcgtgatttttttgcgggcatccagcttggggtaggttgcccaaaaaacaacgatcgaagtatccagtggctgttttaaataatctactaaactatcagtatcttgctcgggaacattgcttttcttctcaccagttaaaaaataaggcttctcgacaaaaatcaaacgataatcaccaaaaaaaggtaaagtttcagcctcgtcaatcactgctcctaagccattttcttccatatcaaaagacatgaagttcaattcctctaaatcatccttcttcattcgatctaaaaacgcctgacgtatttcctgaatcaaataatcttccgtcccggttacaagatagaccggtttcaatgacgcatttctgatttgctgaagggcttcttgtgtattcatgtcattactcctaattcaaactattgttcttcatatgaccttatcgataaacgaaagacctgactatttatgctaccacgattattccagaaaatctattaggagtttgatttctccccattttgtaatagcggaccagtgataataaatcatcccttgttgatctgttcgaaaaacgcgaattttctgcttgtttaattttgttagggtctcttgagtcggatgaccgtaacggttctttttaccagcagaaatgatcgcgtatttcggccggactttttctaacaactcttttccagttgacgtattgctgccatgatgaccaacctttagaaagtctgttttcagctgcggataatttcgaatcagcgtttcttctcctgtggtttctaaatcgccagtcaataagaaacgttgatgatttattgtaaaataagtgaccagtgaatcatcgttttcacctgtgctcttttcaggtgaaagtatctgtaccttaagcttattaccgactgtatctccctttttcactaaatggatcttagtgcccttgattgattgaataagcgtcttcagctctacttgagaaccctttgctaagtagagattttttaccttaacgttatctatcacgttcaccaattctcccatatgatcggcatcattatgagtaattaataaatgatcaatttttgtacaacctaaagatttcaaaaacggcagcagattgtaatccgaaaggtgcttttgttgacgcctctgccacttcttttgcctgaattttaagcggccccctgtatcaatcaaaaaggtctcctgcttgaagggcagcttgataaagatactatctccctgacccacatccacaaaagcgaccataccctttgctgaaaaagagacagaagctattagcaagaaggcaatccccaataaccaatatgtttttcgctgatatttcaaacgatcaattaataaaagaacaatcagaatgagaaataagaggatcgtaaacgttggacgacctatcgttagatttggaaaagctgctaacgctaatactttttcaagtaatcgaaagaactgctctagtaaaaaacttaaaaattgcgggattggcaaaaagcagcccaaaaagagaacgatacaccctggtaagatcaaccattcgaaaagaggaaacagtaggatcgtaaataacccgccgataattgtccattcactaaagctatagatcataatcggcaaggcaaaagcagaaaataaaactagctgttgccatttttttagtcgcaaatcattaagataggacagtatcaacgcaaaatataagcttagctgtgcaccaactgaccaaaatactaatggaaaacaaaggattagtaaaaatagcataatactccactgatcaagttttgaaagctggatttcgagggtcaaacaagcaaaagcaatgagaaaactcacaactgcccgaattgtactaaaaccgctaccagtcaaaatgatcaatagaagtccaactgcactcaacaaaagaagccgcgtctctctgaccagcccagctctcttcagaagtaaatgaaccccgcctaagtaaaactggatatgcatccctgatagcgtaaacaaatgcaagagtcctgttgtcttgtaggcagaggtataatcagcaaattgagcatctttatagccaattatcagtgctttgatataactagccaatcgcgtagaataacgccggtcaatcctccaaatcaagcgttgccgcacatcactgattgaaaatcgctgtatttttacaggctttattgcctttgcttgcaaaacttgagtaaacccaaggctttgatagtatttttttgcatcaaatccatttagatttctggcattgtcaaaatcttcggtatcgccattgactatagccatattaggcaacgcttttccttgccaaatcgccttctctgctggagacttcaaggtattataaacgaaatattttttcccttgtatttttcctgtcaactttaggaaattcccatcaacctttatcgaatccgtttgaattttcaaatacccatttgttatcctctgaggctcattctctattttatttacataataatacgttcgtaaactaagaaaaaaactgcacaaaaagaccatcagccatagccaacgatttttcatgcagatcattcgaataattaaactacttaatagcaacaacagcaataaatgaaactgataaaacaaactcgccactaaaatagcgctcagaatcggtaagattaaataattgcgcagggagtctatccttttggtaatgtggcagcatcttctcctaattgcaattttgtaaagtatttgctttccaagtgaacctgatgtgcactggcaccaacttgattgattaactcgattgcatatggatcattgcgataatcctttaagtaatgaatctttttgattccagcctgcagcaaagctttagtacacgccaaacatggaaagtgtgtcacgtaaacctccgcttgatccgtcgcgatccccaatttagcacactgcaataacgcgttcatttccgcatgaatcgttcgtaaacaatgtccgtcaacaacataacagccttcatctatacagtggacatcgccgctgactgaaccattgtaccctccggcaatgattcgcttgtctcgcacaatagtcgcgccaacctccaaacgagtacacgtgcttcttaatgatagtaaaacggcctgcgccataaaatattggtcccaaggaattctttctgttgtcaaatttgtcgtcctctctttcgatctttcttatattgtaatcgagtcccttaaattttcaagcgtcttttcgccaattccggatactttggtcaaatcttctaccgtatgaaaactgccattttcttcacggtattttatgatgtccgcagcacgcttttcaccgattcctgataactgctgtaattcagctgcgtcagctgtgttgatattgatttttgctgtttctgagtttgagcctgtcccacctccagttgggctgacttcgttgattacagggacttcttctccgatttttggcacataaataatttcttgatctgctaataattttgaaaaattcatttggttttgatccgcatcctctgtaaatccacctgccaaatcaatcgcatccattaaacgcataccttgtctgatgcgatacatgccagtctttttgactgcgcccttaacatcaacgtaccactcctgactgcttgattcagttgttttccctatgctgctttccgttgaaaagagtgctggatcaacggtttcctcctcaggctctctagttaaaaagaaaaaaacagcaatcattaaaaccacgggaaccgcaaacagatacggatacttcttgagaaaatctttcataacaccctcctttaaaataaaatacgcaatttttctaaaaaacgtttatcagacaatcttttttaacaaaaaaagtgctggacgcattgtccaacacctttataatagttatttcattttttctaaatagtctaacgcatcctgtaccgttttgaccggtacaatcttcatatcggtctttaattctttagcggccgctttggcttcttcataatttgacttgataccaggctgcgcttttttcatctctttaataatctcatcatctggtgcaaagaataccttgttattgctggcagcggcactagcaacttttttatcgataccaccgattcgaccaacttcaccttctgaattgatcgttccggttccagcgatttttttaccctgacgtaaatctttatcaacgagttgttcatagatttccaatgtaaacattaaaccagctgaagggccgccaatgtctccggcatcaactttcactttctcctgtgaatcgatctctgtgtggtcagtcaatgtaatgccaattcccggttttttatcggtgggaagcttaatcaatttttctgtagcttcctttgtttccccatcatgtgtgtaggtcaccttcattttctgaccaactttttgcgattttacatatttcatgaaatcttcgctgctggtaaaggtttttccatcggccttcgtgaccgtgtctcccacactgatctttccagaaaagtttgagttcttttcaacacccagcacataaacccctttatacttcatctcataaggtttatttgctaattttaatgcctgctcaatcgcaaaattttgagaggtttccatattaaatttttgaatctgcatatattcatcatcgctggctccgccagtcagttcatctgcagaaataatttcatggaatggttcgatctttgatttgattgcagtaaaaacggtggctcgccgaattccgacagaagttaaactgaaggaacccttatcttcatcttttttatcattaacagtaatcaattctttcaggtcgattgtctctccaggctcttcgatgtagtaaggtatcggtacaatcacacatgctactactactaaggctaagaaaataagggctaatcgtttgacaagtttattatttttcactattctcacgcttctcttccaacgcctgataaactgcctcaggcaaatattctttgacatccccattaaatgtccatacttcttttaaaattgacgaactaatatgactatattttggctccgccagtaaaaagactgtttctagttcttgatcaagatgtcgattcatcaatgcgatctctttttcatactcataatcctttatactgcggattcctcgcaataggaattttgccccaagcttttcggctacagacacggttaattcgttctcttgagtgatcacacgcacattcgggatgtgtttgacagattcctttacgatagcaagtttttcttccgaagtaaagtaactctttttacttgtattcacgaaaatgccgatgattaactcatcaaataatttcgcacctcgctcaattgtatccatatgtcccattgtcaatggatcaaagctaccgggaaaaagcgcgattcgtttcatcttaatcctcccaatcatagatagttacagcagtaatgccataatcatggcgcttgcgttcttttaattgaccaatcttctgtggcagtataacatctttatccgtctcgcaaacaactatcgcctgatttgttaatagctcattatccagcagcatttcaatttgcttcacaatttcctgcttcgcgtaaggcgggtctaaaagcaccagatcaaatctcaaatcaccatctgccaattgcttaatggcttgatttgccggcattttcattaactgaaaggacgcatcacgtttagtcattgagacattttcacgaataatttccatggcacgatagtttttttcgactagaaccgcttgttccattccgcgagaaactgcctctattccaagcgaaccgctgccggagaacaggtctaatgcagcaccaccgtcaaagtaaggaccaatcatattaaacattgctcccttcaccttatctgtcgtgggtcgtgtgttgtttcccgttaatgtttttaacttccgaccgccaaattcacctgcaactacacgcatgatcccatgcctctctttcctgctaaaatatctctactaatttaataaagctcaatggaataatcatattatcaaagaaaaagatgaaaaatgtttgaaaaaatcagacatttttcaccttacttagactgtttctgctaatcgaatctttgtattggcttctactacatccaactcatcatcatctttcacttgataagcagccttcgttccaatccgatctgcaaaattcatttcgatatctgggcgataagaccgttccacttgacgcacaaaatgcagcgtctgaagtttttcttccacttcctcgactgtctcttcattcacatacaataccacatatttcatctttcttgagacaaaatgaaccaagccgtatcgctttaaagtttttaattgcttcaaggaatagacccaaacaattattcctcgtcttttttgcattataaattcagtattatccatgacaattccccttacaactatgattccctgtttcaaaaaaaggatttccagcatcaaccttgatctccgctgaaatcgtctgtgcgatacgttgaccaacttcatctaataattgttgaagatccgtttctgctaaacgaaaggctgccactttctcgttaagatcaagggcacgtttactcaatcgaacgcttcgctgcagttggcggtagtcaggtgcatactccccatagcttgcaatttgttcgaatttatctttctctttttgaaaagcctttttgagctttgcaacttctggactcgtgttcatctctgttctttttagcagatagtttttatagctttgactcgctagtatttcctgaatcagcaattgattctgatcctctagctgaaagaaagcatcattaataatcaacttattcactatcctttgttttttctggttcctgtaacaagactagcacactttcttgattaattgcaacgccaagatccgcatcaggtgtacgaaatacttcattcaaatgctctcgactaatccaattaaacagattgaataaaggatcgaccattggtgaatagaacaagccgctttggtagtcgattttttcatgtttagctaaatccttaaattcagctgctgataattcaaaagacaaattacttaaatgtgccccttgatcagtctgccactcttctaaacgctcattagacagcactctttttggtcttgttaagaagctttttaaaagctttttactatcctccattgattgatcaggtgccgttaatttaggcaatttatttaaattgcgatactgattgattgcttcaatcgtccgcgactgcttttgtgcattcaacacattccaatcaagattactttcttgtattcgatttgctagaggattcccactgttgatctgataaggcatcaagcgtaatagattttctaagtctaagaagactgcacctatcagtttttcattgtcgctgttgaaaaaaagcatcgcaaacgtgttgttttcaaacgcaatcaatggacggaaacgcatgtcattctcgctcaattcgatcgccacaggttcctcgtcataggtcagagcaaaatctgccgataaattgatttgatcagatagctgactgctagtcattccaaacttaaatggttcaatagccgcctttttagccatcactttgattgtactaactttaccagcttctacattcacttccagaataccacgctcaagctcataatcccgagtctgaaagaaaaatccgctatcttctatctttgtcggacgaccaaatttttgttcaaaggtatcaatgggctgagaaatatattgagcatagccttctgttttgattgtttgatgcttcaacgccttatgacgtaccacttgatttttttgctcaaccggtacttgcttttgcgtaggcggaaagaggactggctgtaaatagtaaccaatcaaaacgatacataaaatactaagaaaaccaatcactcttttcacacaacaacgctcctacttaataatgcttatttttcttttacttcaattaataaatcgccggaagaaatgctttcgccctcttcaacgtataaatgtgatacctcgcctgcaaaacgtgcatcaatggaagtctccatcttcatcgcttcggtaatcagcaatggttgacccttctcaacatgatcgccttttttcactaagaccttcaagaccgatccggtcattgtcgcgccgatttgttcacgatttgttggttcaactttacgtttcgtttggacggcactcttgattgacgcatccttaacaagaatttcacgacgttgaccgtttaagttgaagaagagtgtccgatttccttctacatctgcttctccgatttcatctaaacgaataatcagtgttttccctttttcaatttgaacattgattgtttcaccaagacgcatgccagtaaagaacgtcggtgtatctaacaacgtaacatctgcaaattgtccataggatttttgataatccaagaagacctgcggatacattagataacttaatacatctgtcttacttggctcaaagccgattaactcttgtaattcttgcttcactttttcaaagttcacaggttcagcaaatttacctggacgttcttgcattgctggacgtccttgtaaaatgatacgttgtagcttttcagggaagccgccaaccggctgaccaagctcaccctggaagaagctgacaactgactcaggataacttaattcatctccatgatcatagatatcttcttctgtcagctcgttttgcaccataaataatgccatgtcaccaaccactttggaagacggcgtaacttttacaatatcaccaaacatcaaattaacagtttggtacatttctttgatctcatcccatttatcgcctaaaccgacagctttagcttgctgttgcagatttgagtattgtccaccaggcatttcatgattataaacttctgtttgagcagccataataccattttcaaagcttgcatagtagggacgaacgtcttcccaataatgattgatttgacgaacgttctttaaatttaactcaggcgtacgatctccgtattgcagagcgaaatacaaactgctcatacttggctgactggttgctccgctcatcgcgctggttgcaacgtcaacaacatccactcccgccttaacagccgcagaaagtgtaataagtccatttccagaagtatcatgtgtatgcagatgaattggtaaatcagttgtttctttcagctcactgattaaacggaaggcagcctgtggtttcaatagaccagccatatccttgattgcaatcatatgagcaccgattgattccaattccttcgccatacctttatagtagtcaacgttatacttcgtacggttaggatctaggatatcacctgtataacaaatcgctgcttcagcgattttgcccgcatcccgaacatattgaatgcttttttccatttgcggaacccagtttaagctatcaaagatacggaaaacatctatgccgttatgagccgcttctttaataaattcttctaatacattgtctggataattagaatagccgactgcatttgagccacggaacagcatttgcagcaatgtattcggcattgctttacgtaataatttcagacgcttccaaggatcttccgtcaagaagcgataagcaacgtcaaaagtcgccccgccccacatctcgcttgagaacaattcaggaataccttctcccgtcgcttgagctacatttagaaggtcatgtgtacgaactcgcgtagctaataagctttgatgggcatctcggaaagttgtatccgttaataagacagaatcttgttctttgacccatttagcaactgcttctggaccagattgatccaagatatttttcgcagtaacgatttctcttttctcaatttttggcgcccgtggtgtttcaaaatagcgtttttcttgtttttcgattccaggaaacccgttaactgtaatttcagaaatatagcgcatcgttttatttccacggtcacgaacgcgtggaaactcaaataattcaggcgtattatcaataaaggtcgtcttcgcgtcaccactttgaaaaacaggatggctaatcacattgtgcatgaaaggaatattggtcttcactccacgaatccggaactcaattaaacaacgctgcattttttcgattgcttgatcaaaattcaaggcatgggtacatacttttactaataaagaatcaaagtatggcgtcactgttgctccagcataggcatttcccacgtctaaacgcactccaaaaccacctggtgagcgatacgtatcaattttcccagtatccggcataaagccattcaaaggatcttcagtcgtcacacgacattggatcgccgcaccagacatttggacatcctcttgtttaggcaagccgatttctttatgcaagtctttcccttgtgcgatcagcaattgcgaagtaacgatatccactccggtaattaattcagtaatcgtatgttcaacttggacccgcggatttacttcaataaagtagaagttatcgccttcaactaagaactcaaccgttccagcattgacatagccaacgtgcttcattaattgaacagccgcttggcagattttttctcgctgttcggtgttcaaggagatacatggtgctacttcgacaaccttttgatgacggcgttgtaccgaacaatcacgttcaaataaatgcaaaacatttccatgagtatcccctaaaatttgaacttcaatatgtttaggattggcaacatatttttcaacgtagatttcatcattcccaaaagccgctttcgcttcgcttttggcacgatcatagccttcacgagcctctttttcatcatgagccacgcgcatcccgcgaccaccgccgcctagcgctgccttaatcatgatcgggtaaccatgtgattcagcaaattccaagacgccttcaatcgtgtccaccggaccatcagaaccaggaattgacggaattccagcctctaacgcagccgtttttgctttgatcttatcgccgaaaatatctaagtgatgcaactcaggtccaacaaaaacaagaccttcttcgcgacaacgtttcgcgaactccaagttttctgaaaggaaaccatagcctgggtgaatggcatccacctttgcttctttcgctactcggataatatcctcaatatctagataggcatcaatcggttttttccctttaccaactaaatatgcctcatctgatttaaagcgatggaccgaatattgatcctcctctgcgaagatcgccaccgttttaatgtttaattcgctacacgcgcgaaaaacccgcgttgcaatttctcctctatttgctaccaatacctttttcatgcacttcactcctgactttttaagtattcatactcgattgcaagcttcgttcgtttttcatccgcactgatattcaatgcaaatgctacgcccactgacaacacgagtaagctatttcctccttgactcaaaaacgggaacgtgatcccagtcaaaggaataattcccaaaataccaccaagattaataaaaacttgtaataacaacaaacttccaattccaatacaaatcaaagaattgaaaggcttcttcgaacgaattccaaccaagtaaattcgtgcgatcataaaaatcaaaattgctaatataacaaaagcgccgatcaaaccaacttcttctattacaatagagaagataaagtcagtatgagcttcacttaaaaaaccttttttctcaatactattaccaagtccgcgaccaaaccagccgccgttaaacatcgcataataaccattgaccatttgatggccggtatccaactcgaatttaaatggatttttgaagctttcaaatcgactggcaatgtattttaatttcccaggaagaaccttatcaccaaaatgagttaaaaattcgatgactagaaaacttccggtaattccaacaccaccaataattaagctgtaaacccagttgactccactggctaataacaaaatcaaggccaataaagtgatgatagctgcattccccatatcgggttgaatagctactaaaaagatcatagcaaaaactaagatcaatgggcgtttcatatcattgatgaaattgtcttggatcgtttcctgacgcttcgataaaatatatgaaagataccaaatgaccatgatcttcaagtattcagctggctgcatagtgaagcccccgatatcgatccagcctttggccccatttcgttcatcaccaaaaaaaagaacgacgattagtaatataaagatcaaatacgtaacaaaaatgatcagctgctgacttttcagcacgtctgtcttcatcttgtacatcaaactaatcacaactaaacttaatacccagaaaatcccttggttcattaccagacttgtcgggttcgcattattcgtaatcaataaataggaagttgaactataaacaaaaatcaaaccgatcacagtcaaaattaaataaggtatcaaaatactatagtctaaaaaatgacgtttctttatcttcttaggcaagagttaagcctcccagccggcatccgtcatatcttgacgattctcgtacaattccgtatataaacgattcagctctgcttccaattcactaagcatcttctgtccttctcctcgctttaatataccaaccttttcagcaaagaagacctgacgggaaaagccatacatttgtgtatcaacgacttcctcgaaggctttacattgagagatacaaaggctatttgtttgattgcgaatcaacaatttgattcggtcagcatcctcttgtaatactttaatggcaaaatcagaagaaatattttccattttgcttccctcctatcttgattcaacattataacatagaaaaattttaaaaaggaaaaaaataagtgagactaagctttttctaaactctttgttcggattttgagttttacacagccaatctaatattacataaagattacaaactaaaaacttaagcgaaaaacgcgaaaaatcaattcttttttgttttcctcttgtgaaacaaataagtaatatgaaacataacagttttttatcattttacccgttcatattttcttagtaggactaaaaaaatttctcaattatttctttcggaagcttgattctccacgacaaatagcccgctggttagcaggctaaaaaattctatttgtatgaaaagatgcaagttatcatccacctcataccaacgttggattttttgatgagctggacacaacgattactctcgtttacgaattcgctcgagtaaccgctttcgttttttcttaggttttgcaggtggagattccttgttcaccgcagcgacgatcgcttcctgtggtgcctcttccgtgcgttttccggtgacaatcagcttcgctgggacggattgatcgtctgcctcgatagtcaatggttcgattcccgcgggaaaacacgcattgatcagcatgaatgcttgactctcattcaaatcccacgaatggtagccacttggcagctcaattgtttggacgaagcgattcggctgcggccattcttcggtaatggttaaatcctccggaatccgaatcgtttccggaatttctcgattattatcaggtgtcttcgactgttttattggttcttccattgtttggacagctgctgtttggtccgtttgagactgtgctgattttttggcagcttttccatcattaaaaatggttctttctgtttttttgataattttggcatggcggacttcttgaaataattcaacgccatttttttcaaatagttttagtttcgtcaattttgttaatgaagctttgatctcttctgctgatttggataaatcaacatcctttatgcgcagtcgatgggatttgccatcgcttttgccgaattctgctgctaatgtataggttgtttgcatgtttttagtcctttctagtttctttcatctcgttattttctccattttttccgcaggtcctcgtcatgagccgaccaatcctgccaaaggttctttaataaattgtgtaaacaaggtcttcagcttttccacaacataggtctttgctggaaacaatttgatttctaataagcgccattccttcttctcgaagtattctgtaaaaaacagatagtagcggcgcagtgaacgattcgaacgtgtccgcataaaaatgtgacgcacaagatcggctagtacaaaagcgaaatccgcttctgttaattcttctcgtacttgaagcgctatcaaacattcgagcgcgccatcgccatcattcgtttcacgataatactgactaatacgtttttctaaattcttacgtgttaaagtgaatagctgagactcacttaagccataatttttcattgatttatctcctttttcaaaataatacttgtaactccttttttaacccactaaatccgaatctggtgacacccaatcaccaacttgaaaccgaaaacaatgcttttttgtccctgagcaaaacataatccttttttgaaattctttcaatatcaactttttttgaaaaatatagaaataatcccactttaagatgatttattaagtttttgttttcaaaacacttaaacactagcgtttagaacctatctatgaccatttcgactctctaaaataacgagtttttaacaaaaaaagaccacgctaaaaagcgtagccttcaatcatttacttattcaacagctaatttacgtttcttcgctgctttttcacgttcagatttgtttagaatttgtttacgtagacgaatcgtttctggtgtgatttcacagtattcatcatcattcaagaattctaaagattcttccaatgttaagatacgtggctttttaatgactgacgtttggtccttcgttgctgaacgaacgtttgtcatttgtttagctttcgtgatatttacgcctaggtctttatcacggctgttttcgccgacgatcataccttcataaatttcagtaccaggttcaacgaagaccgttccgcgttcttcgacactcatgattgagtacatcgttgcttttccgttatctacagaaactaatgcaccgttacgacgtccgccgataacgccttgaatcaatggtaaatattgatcaaaggtatggttcataataccgtagccacgagtcattgataagaattctgttgtaaatccgatcaaaccgcgagctggagccaagaaaaccaaacgaacttgaccatttcctgaatgaatcatgtcttgcatttctgctttacgttgaccaagagcttcgattacgctgcccatgtattcttctggagtatcaatttgaactcgttcaaatggttcgcatttcacaccatcaacaactctttcgattacctctggacgtgaaacctgtaattcatacccttcacgacgcatgttttcgatcaggattgacaagtgcaattcaccacgacctgaaacagtccacgcatctggtgaatcagtgttttcaacccgcaatgaaacgtctgtgtgtagttctgacatcaaacgttcttcgattttacgagacgttacatatttcccctcacgtccggcaaacggtgaattattcactaagaaagtcatttgtaatgttggttcatcaatatgcaagattggtaatgcttcttgatggtcaacaggtgtcactgtttccccgacgaagatatcctccatcccagaaacagcaatcaaatcgccagcctttgcttcttggacttctaaacgttgcaaaccaaagaaaccaaagattttcgttacacggaaatttttaatcgaaccgtcaagcttcataaccgaaacttggtcgccaaccttcatttttccgcggaaaatacgaccgataccgatacggcctacataatcattataatctagtagagaaacttggaattgcaatggctcatcgctgttgtcaacgggagcaggaattttttcaataatggtatcgaatacaggagccattgttggttcttgttcttcaggattatctgataagctagaagttccgttgattgctgaagcatagattactggaaaatctaattgatcatcgtctgcacctaattcgataaataattctaacacttcatcgacaacttcttcaggacgagcagatggtttatcgattttattcaccacaacaattggtgtcaaatgttgttctaacgcttttttcaatacaaaacgtgtttgcggcattgtgccttcataagcatctacaactaacaatacaccgtcaaccattttcatgatacgctctacttctccaccaaaatcggcgtgtccaggtgtatccatgatgttgattttgtagtctttgtagtttacagctgtatttttcgctaagatcgtgattccacgttctttttctaatgcatttgaatccattgcccgttcttgtaagttaacgtggctatcaagggtatctgattgtttaagcatttcatcaactagtgttgttttaccatggtcgacgtgggcgataattgccacgttgcggatatcttctctgtaattcaattttaattgctccttttcttgtaacgcgagactcactcgattgacaattataacagaaaatcattaagagtgttagtaaaacattttcattttttcagaaaaagtctttttcttaatttttctcttcatcaaacgcttgaatttcctgcatcgccgcttgtgtagcaccgataaagaactcacgacctttgaagcttaatggcttttggtctgctccgcatgtcagcattcccaatagctccatcatgattttacccgccgcataatcccatggactcaaagaactgacatagccgatctgagttccttttaaaatcgcgataaaatctaatcccgcgcatcctaagacccgtactcccatggattgattcccgatttcctgtgcatgatagatatttttacgatacagagctagattcatgccaagcaaaccttgatttaaggatttgttctctggcgcagaaagctcttcattattatagaagacttttcctacctttggaccgccccaaaaaagctcatctctcatgacatcatagataaagcctagctgtccgacaccttcttcgtagaccgcgatcatgatacagaaattttcttgctgcatcacaaagttcaatgttccgtcaatcggatcaataacgaacacccggccatggtcgatcggagtctcatcctgaccattttcctcacctaaaatttttgcttctggatcaaaggccttgattttgctgacgataaaatcctgcgtctccttatcaacgttcgtaactagatcagtacgtccgcttttttgatcaacctttaaggcatcgcctaatcccgccttaatcctttctgctgcttcataaatccagctaatgatttcttgttccattttagtcctcctacatcttaaatcgtttagttgtcgcagctttcgccttttgtaatgttcgatataaagaataaccactgacttcttggaattcgcgcccgatccgcttttcctcaccgatactttttataactgttttgaattttttatatccagacaaaaaagcttctgtctcaataccagattcattcgctgcttcaacaagattcagaaaattgatgactgtcacaatctcctcgtgtgtccaatcctcatcaattgggtaaccataatttgccattgattcacactccattcggaaatagtttaccatagaaaatcaaaagcttttatttaaagcttctctgaaacgaatttcttataaagagataaccttatcttcttctgcaatttctcttaaaacactccaaggatttacaaccgcaataacattttctggaatatttttagtcacgacactccctgagccgatgatcgtatttttaccaaacgtgacattcgcacctatccaaacattgtcttcaatcacgacttttttggaatagctccctgtcattcgttcttctggatgatcgcatgatataatcgcatgatttcctgcacatggtccaaaaagaacatcatcaccaatgtaaatctcaccgtcatctaataaaatacaattaaaaaaacgcgaagaaacgagcctgatatgaatgtttttatcaaacttgcaacgaaaatcgggttcaaaataatttctcctgattttgaagcgctgaagccaagtgaattattcatcttttaactccattctttaaaacatatttttgctgagataatttaactgatatccttatacatcattattatgcttctttaacctttgcaagcgttgactgataaagaatatttagtcgattaccgtaattcacataaccgcaatcttctacaaaaatgtcgataatccgttcacattgccgctgtcctttggggttcttctttttaaccagcagcaaaccataaacaaacttcgcgtataaatcatggtgaatatacttcaaatcacgattcggcgttattttttccatatattctgaaagaattttttccgcctgatccaaataattctcctcaatcaaataacgtgttagatgaagcagagcatcataacgccactttcgcatttcaaagctgccgtcatactgcttgactaagcgcctggtataaaaataagcttcctctggtttaaaaagatccccgttataggtaatcaaaaagaactcgaacttcccccaggtttcggtttccctcaaatagtcagcgatcggtgctaaatcaactgtataactaggcaagaatatataattgtaaaatcgttttccaataagtgcagcaaaaagaaatcgttcttcgttggtttgccgatacaatttttcttgattttccacgaatttttttaataaaaaagaatttccggcatgataagcttgatcaatctcttcctcgattttatacaaccaaacatccatgctatcgtcaatttcaaaaacaaactcatcgaacgttatatttaaccgacctaataattgaagcaaattagaaaatcgaatatctccattttcccgttcgtattttcgtaaaaattgcggcgtcacgattccctcggaagtgttcataatcgattgatttttcttttctcgaaattcttgaaaaaattttcccgtcactatttttcatcctcctttgtcagattcgcgtcaatgaatggatataaaaaattctattatctaaatcattctcccttttaccgacgcgctaaagcaatgaagttgacaattcagcagctcataaaattagttgaacgaaactattgtttctaccaccttagaataccatgaaaaaacaacaagaaaataaaattatcgaaaagattgtttctaaaaaggcggattttttcacgaacagttatactttagtcaaacgaataaaggagcaaataaaatgaacaaccttagtttatctcaacagtatctgctttttaccatgaatcgccaaggaaaaatctcttcactcaattactacgttggtatgtgcctcgttatggcaggtcttctggatctgcaaaaagcgaatgtactcgaattaaataataaggaagtaattctcctatcaaatgagctgcctgaagatttacaatacctcgactgccttttggaaaaaatcacgggactaaaaaagaaacgcatcgaagctattgccaatgcgtacggtacgacattctttgaaaaagatatcaaacaattagtttcccagatccgtgattcacttattgaagccgaagaagtgtcaataaaaaaagattcgcatgcacttgcctatatcgctaaagaagaaacagtcgcaaaattggtctttcgtttagaaaacatgaatccattggatcgtgacggattaaccttagctattttgcttaaaaaatcgagcatcttgaagaagtacattgaaaaagaaaatcgaaaaatacttgaggcaaaaattagagaagccaaaaatgagcctgtttcgaaacaaaccaacacaatgatctctcagcttgattggctagtgggggcaatggctacaataaccattgtttaaatgagggaaataaaatcagcttaattattttataggtcacttcagacaattctgcttaacagtttttccaataattcagtctaaacttcaggaagaaatatagtcttaaataggctataaaaaaaagtcaaaatcctttttctaaaggattttgactttttttttaacgtttaaatgtggattggtaagcctaatgctaattctgatgcgtccatcacgatttcgcctaatgatggatgcggatgaatcgtcaatgcgatatcttctgcattcataccagattcaatcgctaaagcaagttctgaaaccatatcacttgctccaacaccagcgatttgaccaccaatgataacattgtcttccacggtagttactaaacgaatgaagccttctgtcttgcctaatgacaaggcacgaccgttaccagagaatgggaatttgaaggctttcgcttcaagtcctgcttctttagcttctttgattgtcattcctactgtggccaattctggatcagtgaatgctacagcaggcattgctttataatcaacagctactttcttgcctgaaatggcctcagccgcaatttttgcttcatagcttgctttgtgggctaaagctgcaccaggaacgatgtcaccgatggcataaatacttggtacatttgtgcgaccttgtttgtctaccttgatcaatccgcggtcagtcatttcgacacctgcttgttctaagcccatgtcgttcgtgtttggacgacggcctacagttaccatcacgtaatctgcgtcgacactttcttctttaccatcaacttcataacgaacggttacgctatcgccgttatcaaccgcttcgcgagccattgcagaggtgacaactttaatacccttttctttaaaatctttctcaacaagctgcaccatgtctttttcgtaggtcggtaaaatctgtgccgtaccttcgataatcgtcacttcagcacctaaattagcataagctccacctaattcggcaccaattacaccaccaccgatgatgactaatttttcaggtactgcttctaaagccaacccaccagtagagtcgatcacacgtccgccgaatttgaagcctggaatctcaattggacgagaacccgtcgcgacgatcgcattgttgaaagaataggtttgggctgaatctggatgaatcacacgcaagtttttatcatcaacaaagaaagcttccccttcaatgatttctactttgtgttttttcaacaagaatttaacacctgacgtaagcttattaaccacgccattttctttccattcttgggttttcgcaaagtctagctttacattttcactagttacaccaaacatggaggaatctagtgaatcttgataatgatgaccagcagaaatcaatgcttttgaaggaacacagccgacatttaaacaaacgccgccgatgtattcccgctcaatgatcgctaccttttgtcccatttctgcggcacggatggcggcaacatagccgccaggtccagcaccgattacaactgtatctaattcaatggcaaaatctccaactaccatgattttatcatccttccattaatagtaattctggatcagctaataaacgtttaatattgttcatcgctttttgtgctgtcgccccatcgacgatacgatgatcgaagcttaatgaaagtttcattacacgaccaaccgctaattcgccttcatcgttcacgattggttgttgcgcaatcgttccaacaccaagaatggcaacttcagggtagttaattactggagtgaaccagccgccgccaacggaaccgatattagaaatcgtgattgttccattacgcatgtcatctgcagccaattttccatcatgagccaaagcagctttttcattgatttcatcggcgattttgaacatgccttttgtatcagcatttttaacgtttggtacatacaagccatgatctgtatccgttgcgataccgatgttatagtaatttttatacacaatttcttgcgcagcatcatcaattgatgcattcaagactgggtattttttgactgttgcagtcaatgctttaaccacatatggcaagaaggttaatttcgtaccattgtccaaagccacttgtttgaacttcttacgatgatcccaaagtttagacacttcaacttcatcatgcaaggttacatgtggtgccgtatgtttgctatttaccattgctttagcaattgctttacgtgttggtgtcatcttctcacgagtttccatttcgcccatgttagaagtaaatggttgcgctggtttctctgcttttgcagctggcgcacttgaagttgctgctgccgtatcagtggcttgagcttctgatttcgctggtgctgcttgtcctccatctgaaacgaatgtgtcaatatcttctttggtaatacgtccgcctttacctgtagcagttacttgtgtgatgtcgacatccttttcacgtgcatattgacgaacagatggcatcgccaatacgcgcttgtctggattgcttgcttcaacaactgaagaatccgcttttgcttctgtttttgctgtctctgctggtgtagaggattcacttgaagatgcgctagaatcattgtgtccaggtgcatcgatttctactaagacatccccaacatttgctactgttccttcgtctacgatgatctttttgattgttcctgttacaggtgatggaatttcttccactgatttatcattttgtacttctagtaacgtgtcgtcttcttcgatcttgtccccagacttcacgaaccacttaacgatttcgccttctgcaataccttcaccaatatctggtaatttgaattggtagactccgccgccagcattggaaccgtcgctttcagctttatcgctgtctgcagttggttcagccgccggagcagcaggtgtttgtgattcagcagctacacctgaatcaccttcattatcttcatgtcctggtgcatcaatttcaacgagaacatcgccaacatttgctactgttccttcgtctacgataatttttttgattgttcctgttacaggtgatggaatttcttccactgatttatcattttgtacttctagtaaagtatcatcttcgttaattgtgtcgccagctttgacgaaccatttaacgatctcaccttctgcaatgccttcaccgatgtcgggcaatttaaattggtaagccatgttttttcgctccttatactaatgtatttattttttctaagatccgaaaaaataagtctgctgtttgtaacgtaggtttaaaattctacgatttcttttacttttgcttcaatatctgctgcatttggcaaccagattccttctgcttgtccgaatgggaaaatcgtatctggagcagaaactcgtccgatcggtgcttctagtgaaagaatagcacgttcagaaatctctgagataacttgtgcagaaacacctgcttgtttttgcgcttcttgaacaacgactacacgaccagttttttcaacggacttaatgatcgtttcaacatcaagtggtgcaacagtacgcaaatcgatgatttctgcattgatgttttctttcgctaagttatctgctgctttgatcgcttcacgaaccattgcgccgtaagtgatgattgaaacatcagaaccttcttttgtaacagccgctttatccaatggcacttcatagattccttcaggaacttcttcacggaatgaacgatacaatttcatgtgttctaaaaagactactgggtcattgttacggattgatgcaatcaacaaaccttttgcatcatacggatttgacggaataaccacgcgcaagcctggagattgagccattaatccttctaaattatcggaatgaagctcaggtgtatgcacaccgccaccaaatggtgcccgaatcgtgatcggtaagtttcttgtatttcccatacggtaacgagtacgagccatttgtccaacaatttcatccattgcctcgaatacgaaaccaaagaattgaatttcagggacaggtcggaagccttgcaaggctaacccaaaagcaagtccagcaataccagattcagctaatggtgtatcaaaaacttgatcttcaccgaatttttcttgaagaccttcagtggcacggaatacgccgccgttcttaccaacgtcttcaccgaaaattaaaacttctttatctttttcaagcatcagagctaaggcatctgtaattgcttggatcatcgttttttgtgccatgattatttcgactccttcgcttcatagaattcaatttgttctttaatgttttgtggttgcacttcgtacatatttttcaagaaatcagacaccttttgtttaggtacgcggtcagcatcagtgatggcctgtttgatttcttcttttgttgcttcaatcactttttcttcttgttcttctgaccataagcctttttccgttaagtatttacggaaacgtactaatggatcctttttcgtccattcgtcgtccatttcttttgaacggtaacgtgttgggtcatccccagataacgtatgtggaccgtaacggtacgttaatgtttcgattaagactggaccattgccatttgctgcccattcacgtgcctttttagagacataataaacagctagagggtccattccatcaacctgaatacctggaattccagcagcgactgctttttgtgctaacgttttagctgctgattgcttttcacgcggtgttgaaatcgcaaatccattattttgaatataaaatacagcgtttgcatgataggcgccagcaaagttgatcgcttcgtagaaatccccctgagatgaaccaccatcgcctgtataggtaaagacaacatttttactattacgtttcttcaaacctaatgccacaccggcagcttgtacatattgagctccgataatgatttgaggaggtaaagcctgtaaatctgcaggatagttgtttccggcaacatgtccgcgtgaccataagaacgcttccgctaaaggcaagccatgtttaatcaattgtggaacatcacgatagcccggtagtaaaacgtcttccttttcaaacgcaaattgactggctaattggctagcttcctggccagctgttggtgcgaagaatcctaaacgtccttgacgattcaatgcagttgaacgttggtccaatacacgagaccaaaccattgaagtcatcaattcaacaagttcttcatcagataattctggaacgagattttcattaataatctttccatcttcatccagtgcctggtacacggggaaatccgcgtttacatcttttagtaaggcttcaaaatcaatcgttaactctttttctgccatggtgtcacactttcctctcttaagtaaattaaatcttgttttcagtgcaacagcaaatcaacctgtattattgctattgctccttcttctctaaattagcatttttgtattcaattgacaacaaacttgctcagcaattctgaacgaattgaagcgtttcacttttcaaccttgtgaaatcatctgcagcttttttctaataataacaaacatctagattagaacaggtaagtttgtgatcttgaaaaatcataaatttgccataatccccctcatcatcaaggagaaaaaagattaaaatagatggattaacaacacgtttagaccggaatttgttaagcattttcacaaaaaagaaacagaaggacaacacaggtccttctgttatagttcagatccattcttttgcaatttttatatacaatacttttcctagttgtgttgccagcatgtaagcaagaacaattcctgcataccatagccaataactatttggcaaatgaacaaaatcaaattgctcagctaacggtgttagtacgactaatgctcctactactactgccattaataagctgacaaacacctgcggagctggacggctttggataaaaggaattttctttgttcttaccattaaaactaccaacgcttgtgtggttaatccaatcatgaaccagcctgtttgaaatagattttgcgcaccaaccgtattcgctccgaatacaaaccacatgactaaaaacgtaatgatatcaaacacagaactgataggtccaatacacagggtaaattttaacaacccttttgtttcccattttgttggcacctgcaattcttcatcatccacattgtcccatggaattgttagttgagcgaaatcataaattaaattttgcaataacaattgaagtgatagcatgggtaaaaatggtagaaatgcactagcaattaaaatcgagaaaacattcccaaaatttgagctgatggtgatcttaatgtatttcatcatattgctgaatactcgtcgtccttcaatcacaccattttctagaacgcctaagcttttttctaataaaataatggaactagcatcctttgtgatgtcggctgctgtatcaaccgaaattccaacatctgcttttcttaaagcaggtgcatcattgatgccatcacccataaagccaacagtgtgtcccttattttgcaaagcttcaatgattcgtgatttttgcatcggatttagttttgcaaacagatttgtagtttcagctgcttgatacagttcatcgtctgacatttcatcgatttgattacctaacacatattgatctgcagggattcccacatcctgacaaactttttgtgccacgatcgcattgtcgcctgttagaacttttaccgctactccgtgctgctgcaaggatttaattgccggtttagctgatgccttggcaggatcaaggaagcccatgaagcccaccaaggtcatatctttttcatcatctgttgaatagatggcttcatcatgtgcgtcacgacgaacagctactgtaatgacacgcatgccttgacgattcattttttcattgacggtttgtagctgttggcgaatttctggggttaactctagaatctctccatcaatctccacatatttacaaattgctgccatttcttcaaccgcgcccttagtgatcatcaattgatgctcgtctgttttcatcacgacagttaaacggcgacgagaaaaatcaaagggaatctcatcaattttttgaaccatttgatagggcaaatgtcgatcttgttcttcaaaataattgattacggcaatatccatcaaattcttccagcccgtttgataggtagaattcatgaatgcaaggtctaatacttgttcgttttcatttcctaaagggtccaaatgttgaaccaaaacaactcgatcttccgtaattgtcccagttttatctgtacagaggacatccattccacctaaattttggattgaagccaactctttcacaatcactttgtgtttcgataatgtcaatgctccttttgccaagttagagctcacaatcatcggcaacatttcaggcgtcaagccgactgcaactgcaatggcgaagaagaaggcactgctccaatcacccttcgttaagccgtttatcagaaaaactaatggaaaaagaatcataaccatccgcagtaataatttgctgactctagctaatcctaaatcaaatgacgttttcccccgtttggatgtggcatttttggcgatatctccgaaaaatgtttgctgacccgtttttaaaataatggcttttccttgaccacttagcacatccgttcccataaaaaccagatttgttaagtctaatgctgtggcttcttccgtcaattccttgtcttttactagaaatttttcaacaggcatcgattctcctgttaacgacgattggttaacaaaaaggtcttttgtccaaatcaatacggcatctgctggaatcatatcaccagttgctaacgtcaaaatatcaccagggacgacttcatccatcggaatttctttcgtttctccattacgggtaattgccgcagtattttcgatcatttcctttaattcgatgcttgccttttgcgaacggtattcttgaataaaggtaatcagcacactagccaaaatcatgatcgtcataacaaccgccgcttctatgtcattggttaataaggaaacaattgctaatgcagctaagacatacacgaacggatcattaaatgcttgtaaaaacagcaaaattcctggtgttggcttctgtgctgagacttcatttggaccatattcttccaatcggctttgtgcatcttcttcagataatccctgtaaagaggttctcaggtttagaaaaagatcacgatcagataaaatcgctaatttctttagctcttggtctttgttgactttgcgagcaagaaggctttttttgttcatcataatggttcctcctaaaattcaggacaaccgcagtcgtccgcgagtaattacttttcggtcgactatcttcatgatccatcttcctcacatcctttcatttcgttaacagtctaggcgctttaggacacaaataaagcgcgcactcgaaaatgagcacgcgcgaaagtttcattcatgttcatcgtcgagctttagcactatagggcgtagacagaatctgtcagctacgttatgaatcaccttcacgataatccctgttatacccattggcgtctctcgacatttttgggcagtagcctgtgtccgtataggagcctcacctaacaattaatttaattttcatccttactataagtcacttacttatcggtgtcaaacgtaacactgaaaaatttattgattttcagaaattcatcaacttttttgtttggtgaactgctgaaataatctgcaaactttttgctccataatttcgtttcacgagcctctgcaaatttttccatcgtatcatcatactcttcaatcaaagaataatcgtaatctttatatgtgtcataatgaatcaccgcttcttctggcaatcttggttttattcgcatatccacattaggctttccaatactcaagcctgcgaccggcagcacataatcgggcagttttaatagtttgcttacctctgcaatatctttgcgaatagaccccacaactacagaacctaatcccaatgcttcagtcgcaattactgcattttccaacgctaacgctgtatcggtaacagccgtgatcaatggatcaaatccttcgttaattcgataatccatctcatactgctcagctaccttttgcgtccgtttcaaatccgctacaaatactaaaaatactgaactatgcagcatatgagaatttccaggattcattgccacgagctgccggcggatctccgtatcccttacgacaatgatgctgtacatttgaccgttcatccagctgggagcttgacgactagcttgcagaatcttttgcagctctgcttctgataattggtaggtttcatcaaaattccgatatgttctgtgctgattcatcacttctaacgcttccatttaactcctccttaattcctttgaaattacaaacaacttagaaaaaaattcttgtcgtgtttgatccgtcattcgagtataattcactctcattgccattgtatcattactaaataaaaatgcgggggcaatcactaatttttctcgcagaaaaatatcccaatcttttcgggttaagcgctgatgacgccaagtcagatatacataaatgccaccctcgatagacgatatatgccaatcctcagcaattgattttgcctgatcaataaaatctttggccttctgctttaaagtaacaactaattctgcttggttctgctcgaattgtggatctgttaaggcagtatgtgcaatgacctgcggaaaaacactgatagaaaaatccatcatttgtttggcttcagataagcgttgaattaaattttgatcagccacgacccagccaattttgattgaagaaccaaatatctttgaaagtgaacctagatgaatgacttggtggggagcaagttcttttaaagacggcggcgttttcccgaaattcatctcgctgaacacttcatcttctacgatcggcagctggtatttaagactgagttcgattaactcatttctgcgtttctccgacatcgttgtcccagttggattttgaaaagtcggattgagaataatcagtttgatttttttagtcagaatcaattgttccaatttatcaatcctcattccttcccgatccatttctacgccatagagtctgaccccggcgctagcaaaaattggtagggagtataaaaatgaaggatcttcaattgccacactatctccactttggagcatcacctgcaataataaaaacattgcttgttgtgcgcctgaagtaattaggacttgattcgaagagacatcgattttctgctctaacttgattcgctgacagattacttgctgcaaaggacgatagcctaatggactttgctttttttcttcaagcaataactcttcccatgtataggaaggaaaacgaaaatctggaatcatacttaacggcagttcccctgagtacagatcaatagcatcaggattcttcagcaatggataagctttttctacaaatggttcctttggaagagtctcctgcgtaaataagctgcgccaatccactctgggaatagtgcttcgtccccagtttccttcgttcacaatggttccgctgccttgtcgccgcaatacccagccaagactagccagttcctccaatgcgtgaacaacggttgaacgattcacttgataatattctgctagtttgcgttctgcgggtagcttatcccctggttgcaacgtgccgtcttgaatataggagataatctgttcgataatttgttgatagattggggtcgtttttttctccgctaattgccacatacgttttcctcacttattattggatgacttaaaactaaaccaattatactttgctgtcaaacgtacaaaaagctcctgaaaggaattatcaaatgcattttgaaatacgtcagaaaatatgaaaaaatcggacgtttatcctactatccgtgatagatagtaggataaacgtccgtgcatactttattaacctaattctttaaagactattgaaatgtttttaaaagttttctaaaaacctttaaatcgtatcgccattaaagattgaattcttaaccactacatagtcaactttttgcaaggcttctaaatcgttgcctccagcataagaaatcgacgactgaagatcttgctgcatctctactaaagtatcctttaaagaacctttataaggaatccagatctttttaccttccacgtttttcttctcgcccttttggaattcagaggcactgccaaaatattctttataaacgacaccgtcttctaccttggtctcgccaggagattcttcatgaccggcaaataatgaaccaatcataaccattgtcgcgccaaaacgaattgatttggcaatgtctccatgagttcgaattccaccgtcagcaataatcggtttgcgtgctgccttggcacaccaactcaatgctgctaattgccagccgccagttccaaatccagtcttaatcttagtaatacatacttttccaggtccgattccaagcttggttgcatcagctcctgcattttctaattcacgaacagcttcaggcgtaccaacgttgccagcaatcacaaaggtttccggcaaatattttttaatgtgcttaatcatattgattaccggatcagaatgaccatgagcaatgtcgatggtaatatagtctggattcaacttttcctctgccaactgcttcacaaaatcatattcatatccttttacccccacactgatggaagtaaacaggccgcgagactgcattttcttgatgaatgggattcgttcctcttcataaaaacgatgcataatatagaagtacccgttttcagccaaaaattccgcaatactttcatcaataatcgtttgcatattggctggtacgacaggcatcttgaaactaaactttcctaattgaacggttgtatcacattctgatcgactgttcacaatacacttattaggaattaactgaatatcttcataatcaaatactttcatatgggcctccaatgaataagatcactatctcattttatttttttcatacatttcattgcatcaaataggataaagtaatttccttttccaaacacctatttttatactgttcactatgaaaagtatgaaccataaaaaaacatagggcagtatcgccctatgtaatttacaacatatccacctgaaaagcaagctgattttgaaatttattacaaaaaacacgaacatttagttttcaaactaaggcattccttaattttttcgcttgtaaactaactaagaagataacgtcttccatttcctcttcattagttactttcatttcgatctgctgcgtattttttgatacatcttcgaacttttctttgaactcctccgacatcacttttaccatcggtgttaaatagctgattccaaaatctggaaaaggtgtcattactgagaaataggtttcatgaatctggatgcagcaaagcaccccatcatattgctcgattaccagtttccatcctatttgtttttggaaaatatatttgatcgttggctcataatgtctcatgatttgagctaataaaatttttaaatactgagaattgggtagtccggataaaatcatctgcaactcgtggttctcatcatcagctttggatcgtttcctttccatagtcctcgcctctttcaatacgctttggaatgaaaaataattctaacgaatgcaattgcctctatgagttaaattctttttatttttcttcaaattcatatatttttttaacgcttttttcatattcagtttaccacttttaattaaagctgtcatttttttaatccgctacccttttgaacaaaaaaaacgaccgactggccgttttttatttattttaatgattttgctccaatatcttttcggtagaaataaccctcagtctttgcatgatccaaagcttgataaaccttcgtttgtgccgcctcaatcgtttctgcttctgcttctactaggagtacgcgtccgcctgatgcccgtatttctccttgatcatcaacaactcctgcataataaatcgtaacctgatcatcaaaacttggagtaggcattcctttttgatacgcattaggataaccttcagccgctagtacaacgccgacagatgcctgatcactccaaaccaattctggttcttgatcgtttaaaatatcatcaatcacttgtgcaagatcactggttaatcttggtagaaccacttgtgtttcggggtcgccaaagcgagcgttgaattcaatcactttcggtccagcatctgtagcaatcaatcctgcatataaaatacctgtaaatgatgtcccgtttttcaccattcccaatgcagcggccttcaaaattttctcaacagcagtatcgaccatttctgaagggatttgcggtaccggcgagtaggcgcccattcccccagtatttggtcccaggtcgttatcataagcccgtttgtgatcctgtgcaatgaccattggataaactttttcattttttacaaaagcaagcaatgaaaattcttcaccagctaaaaattcttcaacaacaactttatctccgctttcaccaaaacgatgatccgtcatcatttcctttaaagcctgcagcgcttcatctaatgtcatagcaaccgtaacgcccttgcccgctgctaatccatctgctttgatcacgattggcgcacctttttccttcacgtacgcgcaagcggcttcgtagtcggtgaacgcctcataatcagccgtaggaatctgattgtctaccatgatttttttagcaaattcctttgatccttcgatcattgcggctgctttattcggtccgaagatacgaagacccgctgcttgaaaatcgtctacgatgccattcaataaaggaatctctggcccaacgaatgtccaatcaatctcctgatctttagcaaaagagatcaactcttcatgcttatcctctgcgatatccactagttgaataccgtccttcttcatgcctgggtttcccttagcacaaaaaatatccgttacatgcgaactctccaacatttttttggcgatggcatgctcacgaccaccgctaccaataattagtattttcattgagtcctcctcaaattagtgtctgaaatgacgaacgccagtgaagaccatcgctacgccatatttattagccattgcgatcgaatccttgtcacgaatacttccacccggctgaacgattgctttaattccgtgctgtgcagcatattctacactatcatccatcgggaaatacgcgtcgcttgctaaaacagcgccatccatccgtccttttgcttcttctaaagcaattttgacagaaccaacacgattcatttgtcctgcaccaacacccactgtttgatgttcatttgctacaacaattgcattcgattttacgtgcttaacagctttccatgcaaaagctaaagctctcaattcttccgctgtaggtttgcgatccgttgcaacttcccactcctcaggaatttcttcgacaacatcttgatcctgaaccaataatccccctaaaacagatacaacttctggttgattacttgcttggtcgctgaaatctaaggtcattagtcgtaagtttttcttacctgacagcacgttaaaggcctctttgctaaagcttggagcgatgataatctctaagaataacttatgcatttcctctgccgtttctaaatcaatttcacgatttgctaccaaaattcctccgaaaatggaagttggatctgcttcataagcgaattgataggcttccgcaattgtccgtccactaccgattccgcatggattcatgtgttttaatgcgacaactgttggctcagtaaattctctagcaattcggatcgccgcatctgcatccttaatattattgtatgacagttcttttccgtgtaattgatgggcactcgcaattgaataagaaacaggtagagcattttggtaaaaagctgcagtttgatgactattctccccataacgcaaaggctgcttcaattcataagtcaatgtcattttttctggttcaacttcacccacactctttgttaagtaatccgcgatcaacgcgtcataagctgctgtatgacggaaaaccttcgcagctaaacgtttgcgtgtcgctaatgaagtcacttgatcacttttgatctcggctaaaacaagcgcataatctttaggatcaacaactactgtgactgatgcaaagtttttagcggcagaacgcagcatacttgggccaccgatatcaatattttcaatcgcttctgcttcagttacctccggcttggaaatcgtttctttaaacgggtatagatttacacaaacaaaatcaattggctgaataccgtgctcatccatcgcctccatgtgtgttgtcaaatctcgacggcctaacaatccaccatgaatttttggatgcagcgtttttactcgaccatccatcatttcaggaaagccggttacttcatcaatacttaacgttgaaatccccgcttcgtctaaaacttttttagtcccgccagtagaaataatctcgattcctgcttgaaccaaacctttagtaaattctacaattccggttttatctgaaacactaatcaatgctcttgtcatgatgactctcctttagaaagttttttcactttttgcctaacatttgttaagtctgcgaagaaatggcttaatacttttactctttatctcgatgaaattctttgactatttccgctaaaacctgcggatacagctggtgctctacttgatggatttttttctctaaatcctccaaacggtccgattcagcaacttgcacctttccttgtgcaataattggaccggtatctaccccgctatccacaaaatggatcgtaacgcccgtttcctttactccggcttcataagcatctttaattccgtgcaagcccggaaaatttggaagcaaagctggatgaatattaacgatccgattaggaaaagcttctagtaactcttttccgatgattcgcatatagcctgccaatacgactaactccgctttataacgcttcagtagttctaacagtgcagcttcatagtttttcttatcagaaaactcttttagctcaaagctttcacaaggaacaccgaatttttttccacgttctagcacgtacgcatcatgatgatctgaaaaaagcagaactaactcagcgtcaatctctttatccttaattgcttgagcgatcacttcgaaattcgatccatttcctgaagctaaaacagctattctcatgcctttgcccctttaaaaacaatcgcagtatctttcttttctgttactttaccgattacaaaagtagcttcatttcgctccttcaaatcagcttgcaactctgctaatttttctggcgcaacagccaataccataccaattcccatgttgaaaatttcatacatttccatttcaggaatctcaccatatttttccaatgcgttaaaaatcggtaacactggccaagagcccagttcaatttcacaagctaatttttctggcaacatacgtggtaaattctccacaaagccgccaccagtcacatgggcgataccgttcactaattcttttttaactaaaggaagcactgcttctacgtaaattctagtcggtgttaaaatctcatcactaagtttcccagatagttctggtaatttttcatcaagtgcaaagctgtttgtttcaaagaaaactttacgaactaacgaatacccgtttgaatgaattcctgacgatggtaaacctactaagacatccccagcttgaattttttctccggtaatcatttgtcttttttcagcaataccaacagtaaaaccagctagatcgtaatcatcttcaccatacattcctggcatttctgctgtttcgccaccgatcaacgcagctcctgcttgaacgcagccttctgcaactcctgcaactacttgctctaaacgtgctggcacatttttacctgtagcgatgtaatctaggaaataaagcggttcagctccttgagccacgatatcgttgacgcacattgctacacaatcgattccaatcgtatcatgcttatctgcttgaattgcgaccatcagctttgtccctacaccatccgttccagaaactaaaacgggctcctttaagtcaaattgactaaggtcgaaacagcctccaaaaccaccgattgctcccataacacctaaacgttcggttctttttacgtgctttttaattcgttctactacctcgtaaccagcttctacatcaacgccagctctagaatatgcatttcccactagatccgctccctaattattattgtgtctattcttcaaaaaacgaaaatgattttttcatgctacataccattccaataaacatttatacctttttaaatagaagtgagttttcttatttcaacggcgtgtcctgagaaaagtggaactaaaatcttcatttgtttaatttttgtaatttcttcaaccgtttatttttaatagaatgaaattttttccttcaaagttgcttgataatgctcttcatagtcataaagcggcgttggatagtctccattaaaatacgccatacataatccggaataaggtgcatcaaaatctaatccaatagcattgattaatccatcttcacttaaaaatgacaacgaatctgcaccgatcatttcgcgaatttcttcaattgaatggttcgctgcaatcaactctttacgagtctgaatatcaatcccataaaaacacgggtaacgtaatggcggcgaagcaatccgtacatggacctctttcgcgcccgcttcttttaaaagattgacgatccgtcgactagtcgttccccgcacaatcgaatcatcgaccatgatgacgcgttttccttcaacgactcctcgcacagctgaaagcttcattcgtactccttgctcacgtaattcttgagtcggctgaatgaaggtccgtgccacatactgattttttactaatcccatttcataaggaatcccagattcttctgcatatccgctggcagcagacaaagacgaatttggaacaccaacaaccatatcagcttcaatttcagcctcattagctaagatccgccccatatttttacgagcactatggacatttacgcctgcgatattcgagtctggtcgtgcaaagtagatgtactccatggagcagatcgcgtgttgcgtattctcagtaaagctttcgacttttaacccttcatcattgatggtgataatctcgcctggattaacatcttgaataaatttcgcacctacgacttctaacgcacaggtttctgacgcaactacataggcgccgttgaccatttgaccgattgacaatggccgaaaaccattcgggtcaagtgctgctaccatggaatcttctgttagcatcaagtaggcaaaaccgcctttgacagtgttcaatgcttccttcatgcgttcacacaaagtttccttttgactgcggcgaatcaaatgcatcaaaatttccgtgtcagaattcgaatggaagatcgccccatcaatttctagttcttttcgcaagcttttcgcattcgtcaaattcccattgtgagccaaagcaaaggcaccatcataaaaattgaataaaaaaggttgaatattatccacactgcttgttcccgccgtagcataacgaacatgtccaatcgctgcttgaccagtcaagcgactcaattgacgctcatttttaaatacctctgaaagaaggcctagcccacgatgtccatttaattttcctgcatcgttgctgacaattccagcaccttcttgtccgcgatgctgtaagctgtgtaagccaaaataagtgacgcgcgcagcatctgggtgtccccagatgccaaaaacgccacactcttcatttaaactttttacttcattaaacatggaatggcttcctcccataattcttcagctttcttagtagcgacgttgatttcaccgccaagtgcagtcaacttcaagtcgcctgtattagttacttcaccgattttcactgctttatcacctgctaaagcttcgaattctgcttgtttctctggttttacagataaaacaaaacgtgattgtgtttctgcaaacagattttcgacaggcatttccacagtgatgtcaacgccaagctgattagtaaatgctgattctgcgactgccactgccagaccaccttccgcacaatcatgagcacttgctactaagtccgctttgattgctgaaaggactaagtcttgatttgccttctcaacagctaaatcaaagtccattaatttcccttcaatcaagcctttttgcattttttgaatctcggtaccatcaaagtctgctttagtttcaccaacgagataaaccaaatcaccagcagctttgaattcctgcgtcgtaatatgtgacaggtcttcgatcaaaccaaccataccgatcatcggtgttggataaatagctttaccgttagtttcgttatacatcgaaacatttcctgagataaccggggtgttcaacgtacggcaagcttctgaaataccatcggctgaggtccataattcccagaatccctctggtttttctggcgagccatagtttaaacagtccgtgatcgctaacggctgtcctccagatgcaacaatattccgcgctgcttcagccactgcaatttgtccgccgatttcaggatttaaatataaatagcgtgcattacaatcagttgtcatcgccaatgccttgtttgttccgcgaacccgtaagacagctgcgtcgcttcctggtcgaacaactgtattcgttcgtacttgcgagtcataggtttcatagatcattctctttgaggcgatcgtcggttgttgcaacaatgctaataatgtttcagaagcatctgccacttctggtttgaaatcttccatattggcaaattcttgaatccgtactggttcacgcttctcattttcgtaaacaggagcctcttcagcaagcgcatcaactggtaagttagctacttcttctccatgatggtacaaacgatataatccatcatctgttacctcgccaatcgtaaccgcatctaactcataacgtttaaatagttcaacaacttcatcttcatgcccttgttctacacaaatgagcatccgttcttgtgattcagataacatcatttcatacggcgtcatatgcgtttcccgttgcggcacatcatctaaataaagcttcaatccagatccagcttttgaagccatttctgaactagaagagactaatccagcagcccccatatcttgaatacctaccaagatatctgaatgatctaaaattaattccaaacaggcctctaacaataatttttccatgaaaggatcgccaacctgaacggcagaacgctgctgttcttcaccttcgacgaattcttctgaagcaaaagtcgctccatgaattccatcacgtcccgtttttgcgccgacatacatgatggaattgccgacacctttggcctgtcctttttggatgtccttatgatcgatcaaaccaacacacatcgcgttgactaaaggattaccttcataacaaggatcaaaagctacttctccgccaactgtcgggataccaatacagtttccgtaaccgctaattccagcaacaatctcttctaataaatattttgtccgttccgtcgttaattccccaaagcgtaaagaatctaagaccgcgattggacgtgcacccatactgaaaatatcgcggatgattccaccaacacctgttgcggcaccttcataaggttcaacagctgaaggatggttgtgactttctgctttgaaaacaacagcctgattgtcaccgatatcaacaattccggcaccttctcctggtccttgtaatacttgcggtccatccgttgggaatttacgcagaactggcttcgagtttttatatgaacaatgctcactccacataacagagaaaagtcctgtttctgtataatttggcaaacgtccaagaatgtcttctgaaatcaaacgatattcttcatcagtcagtccccaaccagcgtaaatacgctgatccttgatttcttgcgccgtcggttctaatttcatcattagtttgcagtcacctttccaaaattagttaaaatagaagcaaaaaacttcttaccgtcatcagaacctagcagtttttccattgctcgctctgggtgaggcatcatacctaagacgttaccagctttgttcgtaatgccggcaatattctcgatacttccattaatattttcaccttcataagtgaagacgatttgattgttcgcttttaactcagctaatgtttcatcatcacagtaataatttccctcaccgtgggcgactgggatttgaattacttcatctgcttgatattcagatgtaaattttgtttgattgttcacaactctaagcggcgtaattttactgataaatttcaaggattcattacgacgtaaagctcctggtaaaagtcccgcctccgttaaaatctgaaatccattacacgtaccgaaaactggcttgccttcttcagcaaaacgaatcacttctgacataatgttggcaaagcgagcgatcgcaccacagcgtaaatagtcgccgtatgaaaaaccacccggcaataatacaccgtcaaatccttcaaggctgtctgcatcataccgaacatactcacaatcggctcccatgatttccttcatcgcccaatacatgtccaagtcacagttagaaccaggaaatacaatgaccgcaaatttcatgctacacttcctccgatgtcaaaatttcgtaacgatatgtttccatattgacgttggctaataatttgtcacaaacctcttcgatcatttcttccacaggacggtcacttttagcaactttgatctcaaaatacttaccaatccgaacatcctcgatctcattgtatcccatacggtgcacagccccttttacagcttctccttgtgggtccaatacagaatccttatacgttacataaactttcacaaaatacatccttattctcctcgcttttctaatctatttagtacttcttgatataccggaataatgtcacctaagtcacgacgataaatatctttatctaaatgttcatttgtctgtttgtcccataaacgacaagtatcaggagaaacctcatctgccaataaaatcgagccatctttttgacgaccgaactctaacttgaagtcaaccaatgtgatatctattgaatcaaatagttctgttagtgcctcaccaactgctaaagccttctgacgcaactgagtgagctcttcagcagtagcaagttctaaagcaagaatatgagcgtcaatgaccattggatcatctagttcatcgtttttataatagaactcaacaatcggtgattttaaaggagtcccttctggaatcgctaatcgctttgaaaagctgccggcagctatatttcgtacgactacctctaaaggaatgatttcaacattttgaatcagttgttctgtttcagaaagctgtttaatatagtgattagtaattcctttactttttaagaaatcaaagatcaatccggtgatttgattattaagttcgcctttaccactaatttgatccttctttgccccatttaaagcagttgcttgattcaaatattcgacccatataatggctggatcatctgtttgaaacaattgttttgctttaccttcatagattaaagttcctttttccacgtcaaaacgctccctttttatgaacatttataaacgatctccaacaatcgttcgtttcttaatttcttattcagtgtaacaattgaatttgaatttttcaatattttatcggatattataataaaagaagtctgttaatgttcgtgtttatcacaggcggttctatttcttttttagaagctacacaaagacagcgtttacattttgtgaaaatggtgctatatttaattcgaatgatatatatgggggaatcgcttatgttagatgcgccggcagcagctaaaaaatttcttgattcaatgctagaaacagacaagcaacatttattaaacgcattattaggactagacacaactcatagtattaactgcaataccagcttttattcctatcgtaatctaaaaaaaatactgcatccaagacaatctcaagccatgcagtctttacatttttccaatcagtctcaggatgagttgatcatcaggcagctaaaggatcactccttcttgaagaattcctatcggattgaaattcgtttgaattcacaaacttatgattatcaactgatcagctgtttattggaacgtcttcacgaaagttgctttgtagacgtatattcctatgcttaattcaaaaaaactcttaccgcaaaaaaatgcggtaagagtttttttatttgattccgacacgttcaaagactgtatcgacatttttaaggtgatagttataatcaaaagcatcgtccaagtcagctttggataaaacattcgtaattttttcatctgcatccaaaagcggacgaaattgcgtttgattatcccatgcataggctgtttttggttggactaaatcatacgcttcttcacgagtcatgcctttatcgatcaacttcagcatcactcgctgactatagatcaaaccaaatgttgcttccatgttgcgtttcatattatctgggaacacggtcagattcttcacaatgtttccaaagcgatgcagcatgtaatcaactagaatcgtggtatctggtgtaataatccgttccgcagaggaatgagagatatcacgctcgtgccacaaagcaacatcttcaaaagcagtaattaaatgcccacgtacaacacgagccaaaccagtcatattttctgaaccgattggatttcgtttatgaggcatcgcagaggaacctttctgtccttttgcgaaaaattcttcaacctcacgcgtttcagatttttgtaacccgcgaatttccgttgcaaaacgttcaattgatgtcgcaatcaaagccagacttgagaagtattcggcatgtaaatcccgtggtaagacttgtgttgagatttcctgcgggcgaatacctaatttttcacagacaaattcttcaacaaatggtgggatattagcaaatgtaccgactgcaccagaaatttttccagcttccacaccctttgcagcatgttcgaaacgctcgatattacgtttcatttctgaataccaagtagctaatttcaagccaaaggtcgtaggctctgcatgaacaccatgcgtccgccccatcataactgtatccttgtgctccaaagctttttcaccaatgattgttagaaaatcctgtaaatcctgacgcaaaatatcatttgcttgtttatataaatatccataggcagtgtcaacgacatctgtactagtcaaaccataatgaacccatttacgttcttcacccaatgtttcagaaaccgcacgtgtaaaggctacaacatcatgctttgttgattgttcgatttctaagatacgattgatatcgaagccagcgttcgcacgaatcttttcaacatcctctttaggaatctcacctagctcagcccatgcttcatcggccagaatctcaacctccaaccaagctttataacgattttcatcgctccagatatttcccatctcgtctcttgtatatctaggtatcattactattctcccttgtaaaatcatttaattttttcaaatataaactcaaaaacacatcatcaaatacagtgattagtcccatgtttcggttttcttaatatcatctaatgttcgttgaatactatccgtcaaaattgtaatatgacccattttgcgtccctttttcggcatggctttaccataataatgaaaatgccattccggccataaatcaataagttcgtaagtcttcaacagattctcgcccaaaacattgaccattaccgcatttgacaatagcttgggttcacttaatggccaaccgcaaattccacgaatatgcgcatcaaattggctcatgctacaagcttcaatcgtgtaatgcccagaattatgtggtcgtggagcgatctcgttaacatataacgcgccagctttggttaggaaaaattccacacaaagggtgcccactaaatcgactccttgagcaattactttggcgatgcgactcgcctcttttgccactgcggcatcaatcccagctggtacgatcgtttcatgcagaatattattacggtgaacattctctactactggaaatgttacataatcgccaatgttatttcctgccacttgaaccgacaactctttttcaaatggaatccaagcttccagaacgcaagtaccttgacgcaaaagattcattgaaggtgctaagtcagccgtactgttcaaaacatattgtccatgtccatcatatcccccacgcgttgtcttcaagacacacggatagccgatcccctcgatcgcatcttgaatatctgttgggctaatgatcgtcgcataaggagcaatcacgatattattgttttctaaaaaggacttttccatcaagcgatcctgactgatagctaataggtcagttccttgaggtatattggcaaaatgttgaatatgattgattgtatcaacatccacattttcaaactcataagtgatcacctgcgatctgcgagccatttcttctaaagccatttgatcatcataatcagcaacaatatgccaatccgaaacctgcgcagccggacaatcttccgttggatcaatcacacccgtacgaaatcccatttcctttgcactaattgccatcatgcggcctagttgtcctccgcctacgataccaatcgtagagcctggttttaacgatttaaccaagttgttcactactttccaatacagtttctgtcatttgctgccgcttcttttccagacgctcagctactttgttatcatacattgaaagcatctgtgccgcaagtagtcctgcgttggttgctccagcttttccgattgctgtagtggccacagggacaccacctggcatttgtacgattgataataatgagtccaaaccgttcaaagccttcgattgaacaggaacaccgattactggaagagttgtcttggctgctaccatgcctggtaaatgagctgctcctcctgctcctgcgataattactttaattcctcggccgcgagcttgttcggcaaagtcgaacattaaatctggtgtgcgatgagcagaaactactcgtttttcatatgctacacctagttcatcaagactttcgcatgcaaacttcattgtctcccaatcggaggtactgcccataataactgcaacttctggattcataatttacccctttcattattcaagcctattttagcaagtagactttcgtaagtcaaaacgtaattcgaatattaatagatatttctaacctattgttcgttttttactaaaacaaaaagaaacgcagcctctgccgcgtttctttctattttccttctcttttatagccatgaaataatagattcaaaataatcgccgataaactactcataacaattccgttaccagtaaacatttgaacggtttcaggtagtttagcaaatagagtcggcgttgcattaaatcctaaaccaaagccaatagaaatggcaatgattaatagatttttttcatcattgtaatcaactttcgacaacattttcattccttggacagctaccatgccgaacattaccagcattccgccacccaaaacaggttctggaataatctgagctaatgccccgacctttggaaacagccctaagataattaaaaagattgctgaaaagtaaatcggacgacgagttttaatcccagataattgaactaggccaacattttgagaaaaaccagtatatggaaacgtattgaataatccccctagaataaccgctaaaccttctgcacgatagccgcgttttaaatcatcttcttttacttgttttccaacaatatcgcctaaagcgaaataaacacccgttgactctaccatacttacaatagaaataataatcattagtaaaatagaaaatggttcaaattttggtgttccaaaataaaatggttgcggtacatggaacatcggtgcatgaccgatcgccgctaaatcaacctgacccaaaagcgcagctaatactgttccgccgactaacccgattaaaacagcgattgaacgaatgaatccacgtccaaaaacttgaacagctaagatcaaaatgatcgtcacgaaagccaagattaaatttgtaggctctccaaacgttttagccgcagcatctccaccgcccatttttgtaactgcaaccggaatcaacgtcaagccaatagttgtaataacagtacctgttacgataggtggaaataatttttctaccttagaaaagaaacccgaaatcagcaccacgaaaacacccgcagcaataattgaaccgtaaactgtgcctactccatgcgtttgtccaatcaaaatcaatggagccaccgcttgaattgcacatcccaaaaccactggtaacccgattccgaaaaacttattgactgtcaattgtaacaatgttgctactccgcacataaatatatcaattgaaatcaaatacgtcatttgtgcttcgttgaatcctagccctgtcccaatcaaaaggggtacagctactgctccagcatacattgctaaaagatgctgtaaacctaatactgctgattttccatttcctgtttcacttgtcactctacgcgtcctcctcgataaatgtcactttaccgtcatgtaaggaagaaattcttgctagggaaacgactggaatatccatgtcttcaatcaattgtcggccatcttggaaagatttttcaatcaatatcccaattccagcaacacttgctccagcttgttgacacaattcgatcaatcccttagcggcctggccgttcgctaaaaagtcatcgactaataagacattgtcctctgcagaaaggaattttcgagaaattgaaatagtactagtcacctgtttggtaaatgaataaacagaagccgtcaataattcttcatccatcgtcaagctctttgacttacgggcgaaaatcattggcacctttaatgcttgggcagcataaagcgcaggtgcgattccagaagcttcgatcgtcactactttagtgatttttttatctgcaaatacttccgctaatcgtttacccatagcatccatcaattcaggatctacttggtgagtgataaattcatcaacttttaagacaccttcacctaaaacacggccattatctctaatgcgatctgtcaattctttcattaatactttccccttttcttgtcgttttttgattactacaaaaaacgcacctcatctgcaaagcaaaaaaggtacgtcaccgtacgatttttacttatagtcttgcgtttacggcacaaggtagaaactgtcaaccatattatgacgatatataagttcacttctaatgaaaattttcattgaagtttatgaaatatgaaatttattatatcagatacaatccgcctgtaaactagaattattttaaatgagaagatttataggtgaatgacatgattgtctaactttattcgaaaatttcttctattataaaggatgaaagctttctctacaaatttagcgattcattttaattggcaagcaagagttgttttgagatgataagagtaatgaaattaaatgaaggtaaggaggattttctgttgatagaatttttttctatttcaaacaatggtatacaaaaaaggactagcaaagggaattggatagctgcttccgatccaacagataaggaaaaggaagaactttgtaaagcctataagcttccctcaagaattttttcgataggccaaaactattcaaatgtctcattttttaaaaattacttgaccgaagacgaaaaatcagtgtgcataatgctttttatcgaccttaaatcaatggatgaaccagaatctttatcttcgactgtcactgtctttttaacgaatgatgttgtgattactataagtgaaaagtcattgattgatgaagtattaaataaatttggatcagagatttcttccgaagctggtctgatcttgcacaccatccaagtcatcaatgagcattacttaagctttttacatctacaacgtgaaaagattgaagaaatcagccaagaggcatcaaatggctcgaatcgaaatattttagaaaaaacgacagataccgagaaaacactcgtttatattgataatttattaaaagaacaacacaaaacaattcattctcttttagattctgatttggtatcttccgatcgtgatttggctatcgagatcgaactacaaacaaaacaagcaacaacctccgttcaaatttatcgcgagatgttgagttccattagcggtctgataaacagcatgatggataaccgtttaaatcaattgatgaagtttttaaataccgcttctctcttactagccttaccgacactaattttcagtctatggggaatcaatactggcgggctactctggaaagactcagaagtcggatcaatcatggtcgttcttttagcgttgattgtttcgatcgtcagcggtatttatcttttcagaaaagattacaatgcttaaaaaagcagtagcaattacccgttactcaaactgtaaacaaaaaatgctccaagctcgtagttcgggcttgaagcatttttttcttatctattttaattcgtttgctactgagaaatgaccgataacatcggtgattcggttcagatccacattaccgccagatacaacggcaacaactttcttaccgtttacatacttgtctacttttcctgctagaatagctgctgttgcaagagcaccagcaccttcaactacgatttttgtccgttgaatcaaatctttcatcgcaagttcgatttcctgttcagatacagttaccatatcgtcaacaagttcttcaactacttcgaaggtaaggtttcctggaaactctacagcgcaaccatcagcgatcgtcgctgcttttttatatcccacttttttaccttcacggaatgaagctgtcatcccatggatgttttcagcctgaacaccgataatattgatgtttggattgaaagttttcattgccactgcgattccagcaattagtccgccgccgccgacaggcacaataacagtgtcaacatcccagatggaatccaagatttcaaggccaattgttccttgtccagccattacaaactcatcgtcataaggaggaatatacgttactcctgtttcttcaacgattttttcacaataagcctttgcttcatcaaatccagcaccatgtaaaataacttttgaaccatagccttcagttgcctccactttagctttcggagccgtttcaggcataacgatcgtactctgaatacccaacaattttgaagtcaacgctactccttgcgcatggttaccagcggatactgcgataacgcccttgtctttttccgcttgggttaagtgagcgattttattgaatgctccacgaaatttgaatgaaccagttagttgcatgttttccaattttaagaacacttgcccaccggttttagcggttagaaacattgattggattaacggtgttactcgtccatactgtttgaccacattttttgcttcatgaatatcttcaatagtgacaggaagctttgtcattgtgctagtcattacagaacatctcctatttcagtataaggaacatcaattgagtctgctaaagctttcgaaacaactttaccattgtagacgcttaagccggataatagtgattcgtcagatttcagtgcattatctaggcctttgacactaacttcttttaggaatgaaatattcccttttgccaaagcaattgttgctgttcttggagttgcacctggcatattcggaacagcgtaatgaatcacaccatgttttgtgaatactggatctgcatggttcgttggtttatcaatcgtttctactgtaccgccctgatcaatcgcgatatcgacaattacagaacctggtttcattgattcaaccatatattctttcactaattttggtggctttgctcctggaatcaagacagttgaaatgaagacatctgcttctttgatcttttcttctaagttttcagtatttgaaacgattacatcaacgttatgatctttatagcgatccttcaattgtttaatacgattttcattcacttcaagaatgattacgtgacagccaatgccgacagccatgtctgctgcattttcagcggcatttcctccgcctaaaataactacagttccagcttcaacgccatcaattcctggaagtaaaataccttctccgccatgttgtttttccagatagtattgacctaaattcactgcgcggcgcccagcgatggcactcattggttttaataattctagaacaccattaattgagatattttctccagataatgccgtaacgccaacttccatcattttttcaacacaagctttgttggctgctaaatgcaagaagccccaaataatttgaccttttttgaaatagtgatattcactttccattggttcctttacttttacgatcagttcagctgtccatgcttcgtcagtatcgacaatttttccgccagcctcaatatattgttcattagtaaaacctgaacctgcaccagcattatcatcaactagcacttcatttccagcttctactaaaattctcacattttcaggtgtcataccgacacgtgcctcaccttgttttggatctttaattacgccaattttcatggtaaatcactcctaatggattattattgaagttctttaacttcggaacatgtttaatatatcacaatgcattttagaagcaacaatcatgtactaagtgttattgatatctcattatccacagtgttctcttcatttaaaataaaaaaaaaaacaaggaacgttgttataaggccttttcaaaataagaacactttcattttaaatatttatattctcttcaaatagtttttttaataaaaatagtgcaagcgcagtcaatttttttatgtgatttttctcatttgaagaatcaagaaatctgttatttttgataaaacaaaaaagctgaggatttattcctcagcttttttttgacaatctggacataacccataaacttccaaccgatgtttattgatttgatatcctgtcagcttactagatgccatttcgacgtcttctaatccaggatagaaaaagtcaacaatcttcccacattctgtgcaaattgcatgatagtgctgcttgttcgtgaaatcaaagcgactcgccgcatcaccatagttcatttcttggacgattccaatttcaacgaattttcttaaattgttgtagacggtcgccacactcatattcgggaagcggccctctaacgaacggaaaatctcatcagccgttgggtgattgcggtactcgattaaatattctaaaatggcataacgctgtggggtaatgcgaactccgccggcctttaattctttgaccgcttgatcaactgcctcatttaccatataagcccctcctgttttgattctatattaaaatgatactattatctgaggggaaatactagcttgattcaaaaattaatatttttcataaacttattggttaaattggaacaattcagtagataggtaacgttcgccattatccggtagtaaaaccaatactttttgatcagaagtcatctttttagccacttctatcgctgcaaacaatgcggctccagaagatataccaactaaaattccttctttttttgcaatttctctagctgtttccatagcatcattacttttaaccggtaaaacttcatcataaatgttaatatttaaaatacttggcacaaatccagcgccgattccttgaattttatgcggaccggattgaccaccttctaaaactggtgattcttcaggctctactgcataaatcttaatattcgaatacatgcgtttcagttcgtttcctactccggtaattgtaccgcctgtaccaactcctgcaacaaacgcatctaagccatttttttcaaaggcattcacaatttcctttgcagttgtttcttcatgaaccttgggatttgctgggttatcaaattgtgctggaacgaatccatccttttcttcagccaatctgttagcctcagcgatcgcgcctttcatcccatctgcccccggagtaagaactagattcgctccataagcctgcatgagcttgcgacgctcaatactcattgtctcgggcataactagcgttacaggatagccttttgcggcgcctaccattgccaaaccaataccagtattccctgatgttggttcgatgatcatcattccaggcttcaacttgccgcttttttccgcatcctcgatcattcttaaagcaattctatcttttacactgccgccaggattgaaggattctagcttcacgtaaatctgagccatttcatccgttgtcatgttcttaagcttcacgataggggtctcgccaattgtgtccaaaattgaatgataaatttttgtcatctttcttcgctccattccttaccttatgtaagttatcttaacgaataatggcagaagatgcgagaatttcgacttttaatttctcataataacacttttctaaacaaattctcttggttctaataaagatattcagtaaaacacctcagtaatctcatcatgataacgaaagctgcttcattttaaatatcctcactacctatatttatcgcttgggattaaactactaaacagattaactacagaccattaaaaagatggagcaaattgctccatctttgaaagattaaatgacaattgtatcccctggcataattgttgaatccgaactccagccattatcagccaataattgatcaacactgataccgaatttttcagcaattccccaaattgaatctcctgattggactgtataggattgaccgctagcagaagctgttgctgattgactatcttgactagcagtagtattttgtgtttgattcgctgtttgcactgctgtacctgctcctggtgtatcgaagcgagtcaaattataggtttggatcaaagaaatcaactttcctgcataaccaggatctgtcgcataacgtcctgttaagtaaatcgccgcgtcttggtagctataagtatggcttttccgcgcaccagcataataagaaccagttaaaagattagcatgtgcttgaaatgattctgcgtaactgttgtaaacggcaaatggttcattcatcgtaacccattgtccatccaaatattcctgtgtgctcattgacactgaaggtccaccattgtattctttgacaccaaacaaattgtaatacggtgcggccgacaattgagatgttccaaaaccagtctcaaccaaagcctgagcaaccataatagatgcataaagatcatttgaagctgaaacctgcattgcagaagcgcctaattgttcaataaatgcagattgattttgcgtctgtcccatttcagctgcacttaccttcacattattcatcgtcaaaacagctggcgaaagtatcattgctgttccgactataggaagcgtcctttttgcggctttcattcgttttgccttttgctgtgttcttatataattatatttttcgatgcgggttttaaattgattcattatatacctccaagaaaccttcgcgagcttttcatttttagttactttaaaagtataatccaagaacaaataacaaacaatttaaacaccgtaaattcactaatttgtcattatatcgtaacatgcgtaacgtaaaagttgttatgtttctgtttaattgcacttgatttttttatatcaatgaaatgaactttagaaattaagaaaaaacgaaacagtgttgaaaaatactctcactgtttcgttcttaatttttgattatttttgtttacataattattttattcgtctattgcttgattctggaatactaattgatcatcaaacaattcaatggataccttggttttcggcattactcgaccagcaataatctcttttgccagtggtgtttctacctcacgtgtaatgaaacgcttcaacggccgtgcaccatattgtggttcataagccttctctgcaatccagcttttggcgtcttcagtgatatctagttggatttcctgttcctctaatcgatgagataaatgctgcacaattttctcgacgattcccttcacatcttctaaactcaatggtgtaaatagaattgtatcgtcaattctatttaagaattccggtttaaaatgacctcgtaacatgcttaatacctgttctttagtcgcttcagggattttaccttctgaggtcacaccatccaatagcacttgagagccaatattgctcgtcataatcaaaactgtgttcttaaaatcaaccaatcgacccttagagtctgtcagtcgaccatcatcaaggacctgcagtaaaatattaaaaacatctggatgcgctttttcgatttcatccaataaaatgatcgtgtaaggatttctccgaacagcttctgttaattgaccaccttcttcatagcctacgtaacctggaggcgctccaacaagtcgcgacactgaatgtttctccatatattcactcatatcgatccgtaccatatgatcctcagaatcgaatagattttccgccaacgcttttgccagttcagttttaccgacaccagttggtcctaaaaatagaaatgatccgagcggacgatttggatcctgcagaccagcacgcgaacgtaacactgcatcacttactgcatccacagcctcatcttgaccgattacacgtttatggagtgtgctgtttaaacttaaaagtttttcacgttcaccttctaccagcttggttacgggaattccagttagacgtcctactacttgagcaatctcgttttctgtcacggattcctgtaccatcttgatgtcactctttttatttttttcttctaaatcagctaattccttttctaactttggaatcgtgccatgtcgaagaacagcagctcgctctaagtcataattattttccgcgtcttctaactcatgttttgcttggtcgagctcagcccgtttatttgaaacaacattgacttcttccttctccgtttcccattgcaacttcatcgcattggtttcttcccgaaggtccgccaattcttcctgcaagttttctagacgcttcttgcttgcatcgtcgctttccttcttcaaagccgcctcttcaatttccaactgcatcaatcgacgagtcacttgatccagctcagtcggcatcgaattcatttccacgcgaatgctagcgctggcttcgtcgattaaatcaatcgccttatctggcaaaaagcggtcagtaatgtagcgatctgacaatgttgccgctgctactagagcattgtcatgaatatttactccatgatgaatttcaaaacgctctttcaatccacgcaaaatactaatcgtatcctcaacggtcggctccttaactagcaccttttggaaacgacgctccaatgctttatccttttccatatattgacggtactcatctagtgtcgtagcaccgattaagtgcaattctccacgagccagcattggttttaaaagatttccggcgtccatgctgccttctgttttaccggcacctacaatgttatgaatttcgtcaatgaacagtagaattcgtccatctgattttttgacttcctttaaaacggctttaagtcgttcttcaaattctccacggaatttggctccagcaatcaatgaacccatgtctaaggaaaagactgttttgtcttttagattttctggtacatctttacgtacgatccgttgagctagaccttcgacgatcgctgttttaccaacaccaggttctccgattaatacaggattgttcttagtcttccgcgaaaggatgcggataacgtcacgaatttcctcatcgcgaccaataatcggatcttgtttgccgtttttaacctgttgaactaagtccacgccatatttctctaaagctttatatgtttcttcttgattttgtgaggtcactcgatcccctcctcgcatatcttcaatatttttttgtacttctttttcatttaatccttgctgattcaaatatttcgtcaaggagtaattttttaatttcattaaggctagaataacgatctccgttgataagaaatcatcattaaatttttcacgtaactggtcagcttcatttaatagattgaaaagattctgactgatattttgtccgtattgaacatttccaccgctaacggtcggatattcatctaatactttatcaacttcacgttcgaactgatccacatcaattccagcatccgtataaaaattgcgcccaaagtgatttggctgtaaaaatattttccaaacatgagcaatatcaatttcttgatgatgtcttgtcactgcaatttgctgagcttcagcgattgcttcttgtaacgttgtcgtcattttctcgatattcataagcatacctccgacattaatagtagtttacattcattagtatataactttggtcagtaaaggtcaaacaaattgtccttcaatattaaagtttattattatgaagaaaaacaaaataatgctacaattctttcattaatagaaagagagtgattcaatgatttcacgcgtgattggcttcgaaaaagggttcaaactttcgagtggaaaccattttgaaacatatgaagtcatgcttcctaaattaaataaaacggatcttgtcgttaaaaatatggctacttctatcaacccagttgacacaaaattaagacaaacaggtaaaggaacaccccagcctcatgtcttaggctttgacagtgttggcgttgtgacccaattaggcagcgaagtaaagcatcttgaagtcggggaccgcgtccttttcgcaggtactactaaaagatacggcagctatagcgaaagtcaggttgtcgattctcggatcgtcgcaaaattacctcatgacgtttcggccgatgaagctgctgctatgccattaacctttatcaccgcatatgaaatgctttttgaaaaaatggatttggtgcccaaagagaatcaaaatagcggagcaatcctaatcatcaatggtgctggcggggttggctctgttgccacccaacttgcaaaatgggcgggcctaaccgttattacgactgcttctcgcaaagaaagcaaggaatggtcagaaaagatgggcgccgaccatattatcaatcatcataaggatttgactaaacaacttaaaaagatcggctatcattcgttaccttacattctgattcttcattctactgatcgttattttgaagaaatgagcgaattattggaaccattcggtcatcttggttccatcgtagaatccagtaaagacttaaatttagcaaaactcaaaaataaatccggtagctttgattgggagtatatgtttgctaaaaccgattataaccataatatagcttcacagggggccattttggagctcctagtacgactgctacaagaaaaaaagatcaagagtaccctgacaaaaatcattccggggttcacacctgaggttttctatcaggctcatcaaattattgaagaagacgacatgattggaaaattggttgtccatttttaaatcgagtagaggggaaagccaactgaccttccgcccctctcacaccaccgtacgtacggacccgtatacggcggttcaataagttgagtgtacgaactggtacttcaaggagatgtcctcatatccttggtgggccagttctttgtctgttaatgatcgatgaagaatatgacttttggagactgaccaaataccttttcttgtatttgaccattcatacgctttcgctttatcgatccctaaacgaatcagatttttccttttggttctcggattcttccattgtttccaaatatattgtctgattcttcgcttcaaccaaccgtttaactccctcatgaattctttcatctcaccaattccatagtagttgatccaaccagtcattagttgcttgatttcttttaaaataagttggatacttcttccacggtttcttttagtgagttgtttgagcttgcttttcacacgctgttttgcttttgcgtgagggcgaattttaatacctttctttgttggcagaatgcagaatccaagaaactttcgtttcaatgggcttcctaccgcactcttttctcgatttaccgtcaactttagttgttcttcgagaaattgaatggatttcttcatcacacgctgtcctgctcgtttgcttctaacatagatattgcagtaagtagcccaagggaacctcccccttaggccctctcagaaccggacgtgaacctctcagctcatccggctcccattatccagccgatggtaatattccaattttccaatgcgcgaataaatttctttctcgcttggcgatttcccctaaccaatgttccgcttttcttcgtgcttgtcgctttttatatttacgacgaacccacttcacgagacattggttgatgtagcgcagtagactgtacatttctgatttatagaatttcatgtaatagttcatccatccttgaattttactattgaacatattcgctaaatcctctagctttttgtccgcttttaattgtaatcgccaattccttacctctttgcgaatcgcctttttcgctttatctgatacagccggaagaaaatttgtgaagcattttccatatttattcttggcgcctctaggtctaaacgtaaagcccaggaaatcgaatgtcgttatcggatagttccccatcctatcactatctctgcagtaaacaatctttgtcttatcaggatgtaactccaaaccaaagattctaaaccgttcttccaatcttttcttcagatatttcgcttgctttagggatacacaatgagtaataccatcatcggcatatctagcccactgtatattaggaaattctttttccatgaagtcatcaaacgtataatgaagaaacaagttcgctagaactggactgattacaccaccttgcggtgtcccggcttttctcgaaacagtcgaaccatcttccctctggaaaggtgcttttaaccatctttccacatataggataatccacttctcttgagtgtacctttttaccatttcaattagatagtcatgtctgatattgtcaaatagtcctttaatatcaaattccagtacccaatctcttttccagcatctaactcttgttttctctattgcctggattgccgacttattcggccgatagccataagaatcctcataaaacaatcgttctactacaggttcaaaatacatcttcgctaccatctgtgcaatcctatcttcaactgttggaatcccaagtactctcagcccaccactctttttaggaatggatactgcctttaccggttttgggaaataacttcccgatgataatcgattccacagtttgtatagattatctttcagcttatattcataagcctcaattgattcttcatctactccaaaagttcctttattggcttttacttttagaaatgcttggtaaactgcttgttttgaaatattgtatgactttgtttcttgcataagttcctcctccttaaagttgacttatccttgaaactggataactcaggttcttcgctccactctcgttacaagagcttcttcactactacaacccaatctgcccccatgactgcatcggtactcttttcttgcggggcttccgcttgaaatactcccttgacatcagcccgtgggttcccacgttccatatagacgcctatgttatgttcatgccacctttatgccgcccgccgcctgatcagtaaacaggtttcctccaagctcatcctaggtcaacgactatacccagttttgacggaatttatacgctttcgacacttctgtgggtggttcgtatggtcactcatctccataacacacacctgacaactcttggttgccttttccttaacgctcaataccatagcttttgactacagcaccttaaggtggtttgaaacctccacctgtatggcggtttcggcaggccgtctgccatcatctatacagcatagctgctttgaatagtttatctattcacgcacactttcatggcgcacagtcatcggcgtatcgaacaaatttatgtcctagattttctagcacttgatcaaattcgttcaggtagatgttacttaacaggggagagagattgcctccttggggcgttccttcttccgttgttgtgatgagtccattttccattacaccactcattaagtattgacggatcagttttaggacttgtttgtcctttactttccgctcaatgaaatacatcagcttatcgtgatttacggtgtcaaagtaggctttcatatcaatgtccaccacatatcggtaaccttgttcataataagattttgctttcttcactgcgtcatgtgcgctgcgatttgggcgaaacccataactattatctgagaattctggttcaaatagcggttgtaacacttgattgattgcctgttgaagcatacgatcaataaccgtgggaattcctagttttcttacaccgccgtttggtttcggtatttctactcgcaaaacaggctgaggtttatagttcccttggcgtaaattggatagtaattcctcgcggtgctctttcaagtaaggaagcagttgatcgacggtcatcccatctgcaccagccgcccctttatttctgactacttgaagatacgcttgattgagattattccgctctagaattctcccaaacagattttctacaccatcttgtttcctctgttcaccgcaagaagtgctgcgcacttcatcatacccttcgtgttccacactagctctttgatgatagccaagttttcttgttttctgcggtcgtcgcatcttctcacacctcctaaattattcaagattcttattgttcagtccttcgtaacggtcagtgtcgttactactatgacctcggctgacttctcatgattcaccatcatgtcgccatgatcgttgtgctggtttgttttcattcaacgcccacaacaccctcatgagatctcccccggtaagagtgaaaactttcctcctatgtaactgctagatttactgtataggtttcgggcagtattggactttgtcttgtgatgaagacttatccgacctaattcagccttgtatctagtttctgttcgtcagttcaggagtttgcgtccgacttccttcagccacaacctcacgattgccaccttgtctttcgctaacagttcctactgccaagcctgtagtggactttcaccaccaagttttcacccatgcagggcgcacaccaaaaaggaagttaacgcttattcgttaacttcctttttagcttctttgatttcatgattgatttgtcgctgctttttgaatagtacataaatcatccctatcaagaacggcagcaagtatgtcgcgtaacgatataatagcaatgaagacacggcatctactcttccaacaacatttcgaaataataaaacataaacaaactcaaagccgccgattccccctggcgctggcaaaacaccaccaataatcaccgtgaagctgataaaagccactgtcagccaaagatcaatatcaggataatcttgaaccaatatgaaatagggtaacgaataccaaacaactaattttgccatatttgagcaaaatactcgaataacagaacgacgatcacggatgaatgatttgatagcaccacgtaaagaataaacttgattattcacctgatcaacgatatctcttaatttttttcgtttgaacaagcggttgcaaatgattactaatactacctgtgcattgatattaagacttaataccaataaactcgaaataattagtaatgttaccaaaattccagcaagcactaaaaagatcccgtttgagatatgttcttgaatcgcatcgcttttcacaattaaaaagaccagcgcccaaaccattaaggcgattttataggtgaccattctcaaggcactcgtgcccgttccttcagaatatctcagatcctttttatgatagtaaataacctcagatacaattgatcctgtaccgaatgtgataacacgatagaaagttgcatatgcggatgcaaagaatccgtctcgaatggtaaattctgggttgaattcacccgcaatatttttaatcgtgtacccttcgattacttgactaattaaaccgagtcctgtcacacctaaaaggaccggtaaagaagttctacccagttcggtgaaaatatcacttagagagtcacgaataacgaagataataacgccgatcattactataaatataaggatatttagaatcaatttacgattgattgataagttcatttttttgcctcatttttttctttattgctatagcctaccacatgcgaatgagcaaaaaaagaaaaagcttcaagttttctcaaagctttttcagaaaaattattatttagcattattttcaataatctttacgattacgtcaactgctttttccatcgtctgtaatgagacaaattcaaagcgaccatgcatattttcagcaccagcaaaaatatttggcgtaggaatacccataaatgagattttagaaccgtctgtcccgccacggattggttcaatgattggtttcacatcaacctcttccatcgcacccttagcaagatcaatgacactcatgtctttttcaatgatttcacccatgttgtagtattgatcatacatgttgatttccacacgttcttgatcaaattggctattcatttttgcttgtagatctgtaatcatttgtttacgttcttcaaatttatcacggtcatggtcacgaataatataggtcattttcgcttcttccacatttccatctaaagctaataaatggaagaaaccttcacgtccatctgttttttctggtcgatcgccttctggtagttggttatggaaatcaattgccatttgtaacgcattaatcatcgtgtttttagctgtccctggatgaacgtttttcccatgcatcgtgatttctgcttgagcagcgctaaatgtttcatattgcaattcgccaattggaccaccatccatagtataggcgaaatctgtgttgaactgtttcacatcgaatttatccgcaccgataccgatttcttcatcgggaccaaagccgacacgtacttcaccatgtttgatttcagggtgattaatcaaatactccatcgctgtcataatttcagcaatcccagatttatcatcagaacccagtagtgttgatccatcagtagtgattaatgtttgtccgacgtagtttttcaaattcggaaaatcttttacatttaatgtatattttccgtcagcatctaacttaatagtagattcaccatcataattttcaacgatttgagggttgactccttctgcgttgaaatctgctgtatccatgtgagagataaaaccgatagtccgcgcttctttgtcaaggttgcttggcaaagtggcgatcacatagccgttattttcgttgtaggtaatctcctgcataccgatctcttctaattccttcatcagctctttagcaaaggctacctgtgtttgagttgagggtgttgtggtgcttgtcgcatcagaacgagtttctgtctttacatactttaaaaaacgcggtaataaattttcgtacatcttactctctcctttaatgctatttatttaaatgaaaaaggatttgtggaagtctcagatacaaaaaattcaaccttccagtcctcttcatttttccattggttaaataagtctaccagtttttctttacatagcgactcaatatagtgtcctggatcaattaccaacattcctgtttcttgcatgtcatgagcggtatgatagtaaacatctccagtaatataaacatccgcctttgctgctacggcctcacgataaaatttttctccgctgccgccgcaaattgctacgcgtttaattgttttctttgtcttatgaggataaaccacacgtaagccttccaaatcaaacgtatttttcactttttcaatgaagtcttctgtcggcatcgcttcctttaattcgccgactcgaccaattccatacttttctgccaaattatcaatttgataaatatcataagcaggttcttcatatggatgagcagcaagcatcgcttgaactacctccgtttgccgtgtctcaggaaacagcacttcaattttactttcttggacctgttcagcaacattcgccgcgccgattgtcggatttgcttctgcatttggcgtaaaacgccctgttccattaatggtaaatgaagtcgcttgataatttccctgttctcctgcaccagcttcagccaatgcttggcgcattttttttgcggcctcttgaggaacgtaaactgccagttttttcatggataccgtatgggtgtgaattaaataatccgtatcaaaaacagctaatgcttcacaaaaccaatcattcaatccattttcaatgatatccatattcgtgtgcgccgcaaaaaccgcgatatcatgtttgatcaaatccgcatacatctttgtttgaatatcgtcagtcgttaaacgagaaacaggacgaaaaatcggtggatgcttcacaattaacagatcaatttttttctcaatcgcttcatcgacaactgctggtcgaacatctaaactcatcatgattcgattgacttctttatttaaagtaccaatatgaaggccgacaggatcgccttcttcagccaaccattcgggacaatattgattaaaacgctggataaattcacttccctgcatcttcaagtacctccttgatccattcaatttccagtataacctcgcggattttttcggtaacatcttgatcactttggtgtaaactagttaagattttttccattttgcttagtttgtgctgccattttttgataaaaacaggagctttttctttcagtaaaactggtccaaagaatagttctttggcagtataatccggctgcactaaatctttatcagcaacaatcagctcataaactttctgattttcttcaatgatggcttcctctgtgatcgtatagccttcagctactagccattgacgtaattgacgctctccaacatttggttgtagaatcaagcgctctttaccggataggcgcgctttttctttcccacgttgtaaaatatcgcggatcaagacaccgcccattccgcaaatagtgatggctgaaatctgatcattcaattcaactgcttcaagtccatccgctaaccgaacatcaattttgttctctaaaccattttttgctgcttgccttttagctgactcatacgggcctactacgacctctcctgcaatactataagatatcttgttttgcagcattaaagcgacgggcagatacgcgtgatctgaacctatatctgctaaacgtgcatcttgcggcacaaattctgccgctttttgtaaacgaatcgataaatctttcgcgttcattttttcacatcctaaaagtaattataacactccttaaaaaaagcgccccctaaaaagagctaaatgatagcgctttttaatagggcgtttgcctttttctaaggatatttttgtttttttaaccgtttcggcgattttcaccgattacccagatttctctacttaaataacgaacacgctccataatccgctttgctttcaaaggttcctcatcgcctcgttgtgtaacggataaatgttgctccaattgatccatattgaaattagatgagaaaaaggtcggtaattgctcctgcattcgatgctgcaagatcactcctagcacttcatcgcgaatccaagcgctcatggagtctgcaccgatatcatcaatcattaagattggtgcccgttttacttcatctagttttggacctactttgtcattggagatcgcttgtttcatttctccagcaaatgttggaaaatgtaaaagtgtggtttcgaaacccttaactgctagttcatgggcaacagctcctaacaagtaggttttccctacaccaaaatcccccactaaaaacaaggctttatgaaacatttttggtgctgcctcatattgattaatgaaatccagagaagcctccaatgcttcactacgcccagaggtaacctcaaaggtgcgaatcgaggccttgcgaatatctttgggcatatctagcgaattcacgcgattgcggatttcctcttcacgcttcatacgcaacagctcatctgtcggtacataggtcacatcaataaagtgaaagtttaaactcaattgcggttcataacccggtgcaatcatagttggatcagaagctaaatattttttcttttcttgaacaaactcatataatttcgcaaaggatttttcgatatcctcttgtgtcagcttttctttgtgctcttcgataaactgacgaacatctggatcggccaaaacttcttccatcatttggcggtaacgaccatcgaccccacggcttttaatgatgcgattcaactcttttcctacatcttccattaatcgtcaccttctttacttaaatattccgctaatttacggttcaattctgcttctttttccggtgttaatttggtctctttaggtggctgtttgatgtgctctggcaacgcttctttacgacccgctccgcgtttttgataagctggacgactggtctgaggtttgcgaaccagtttttgattgttctcacgtacatgggcgattgccgcttcaggactgataatttttttctgtgcccaatcatttgcgatagcattcaaatagttcgcattgattaccgcttggttttgaatgaccaaaatataattgatgattatattgatgacgcttttcggtaacaaattgcgactaatcaattcttctagcaatcgaacttccgtatttgtctcaaatccgcctttttcgcgtttaatcgctcgtaaaaatgttactggcgcaatttttttgctttgagcaatgacctctaattcctgcggagaaaaacttccgttattggcagagctatcgatcatcgtttctttaggctcagcagatacgttgggacgtttttccttgttgatcagctgacgtaaatagctaaaattcaacccgtttttttcaccagcacttgccttcgctacatactctgctaaatccaattcattcaagccatacaaagtttgaaaggtttgcagcttttcacgatcatcataactcaaaaacaaattaaagcgtttaagctgttgcgtaaacaatgaccaatcaaaatctgtttgggtagaaaaagcctcttgtgtttgttctaaactttcactttggctggcaaaagctttatcatcgaaacgataaacttcacgaaaacgtttggtaatattcttgacttcacctttttcaaaggttttcggcttgaagcgctcaactaaacgttcataacgtcgttttcctaccttgtccatcagtaaataagccatcaaaggatcttgaaaaaatttctctggaatcaatggagggtgaagctgatagagcaaactcatgccaatttcattatctgttttttgaaacgtttctaacaaaccaatgccttctaattgttctcgcgctttcaccagattcatcagtccagtatccactgcagctaataaatccgtatgcatgaggctggcactcttaccctctatgctaacatcgctaacaaaagttaaatataagcttaatgcgttactgccgataatcggctgatataaataaagcaacgcatcctgtttgctttgatcaagttgtggctcaccgtagaccgtgtaaaaggtgctgggttttagttcttctgccactaaaaagcctcctactcatcatctgttgactttgctttgtcaacgatttcctgcaattccttcaagaatacagacatgtctttaaactgtcgataaacactcgcaaaacgaatataggcgatctcgtccacttccattaaatcctccatgacaaattcgccgatttgactcgtaggaatttcattttctcccatactgcgaacacgattttctacatgatccacgatctgttccatctgttccatagctactggacgtttttctgcagagcgaatcaacccgcgtaaaattttatcacgactgaactcttcgcgatccccatttcgtttaacaactaataaaggagctgcctcaatacgctcaaaggtcgtaaaacgaaacccgcagctctcgcattctcttcgacggcggatcgctcgcccgtcatctgtttgtcgactatcaattactcgtgaattattatgattacatcttggacaacgcataatttcacccgcactttcttattaattagaatgactcactttgtatgaatatctttttgttatatagaataatttctcaaaaacaaaaacaggtttgaaagaaaacttttttgtttatataacatgagtttaccataaccagcccactaaaaaaagcgtcgtaaagctacgacgctgaattctttaagaaacaaatttttttctttctaaccatttaagaacctcttgacgcgttgtttcttgtgaattgcaattatcaaatacgaaatccgctctttttttcttttcctctaacggaagctggctattaatgcgttttaaagcttcttcttcagaaagattatttcttgccatcaggcgttccaattggatgtctggtgtaacataaactgttgccacttcatccatcattgattcgtaatgtccttcgaataagagtgggatatcaacaatcaccaagtgacttcctttttttgcctctagtgtttgtttttttatttcatcacgaataaatggatcaagtgttttgtttaacagatgtcttttttgctcattttgaaagattaaagttcccaattttttgcggtccaaactaccatcgttttgcaaaattgttttaccaaaaactttctctaaagccatcagtccttcagtacccggctctacgacttcccgagcaataatgtctccatcaacaactggaaatccttctgccttaaaaaaatctacaaccgttgattttccactagcgataccaccagtaacacctaatacaaagctcaaattctacaccttctttagtttttggcaatgaggacaaaggtgtgtccctctttgcgctactttgattttgataattggtgtgccacaacgcgaacacggttcaccagtttgtccgtagacgtgcaattcttgttggaaatgtccagcctctccaagcgcatttaaataggttcgaatggtcgttccgcctgcctctttcgcttttccgatcacctcgataatcgcttcacgcaactggcgagcactttgagaactcaacgtattcgccggttgttcaggatgaatcttcgctaaccagaggacttcatcaacatagatgtttcctaagcctgccacgattttttgatttagtaatagaggcttgatcatggtggaagcctttttcaatttaactttaaaatcagctaagtcaaaatccgcatctgtcggctcagggcctaaccgcgtcaaacctttatactctttcgccgttccttttttcaatagagccattcgaccaaatttacgtacgtcatgataaattaactcagaaccatcagtaaaaatgaaacgaacatggctgtgtttgtctaacgcagtcggctgatcaaaaaattcatactttccttccatccgtaaatgtgaaaccatctcgtaatgtgtaaattcaaagatcaagtactttccacgtcgatccactgtttctattgtttcaccgatcaattgctgctgaaaaatatcgatctcgggaaattcaataatgcgcggccaataaacatcaactttcgcaatcgttttattcttaaccaaagagaccaaaccttttctgacagtctctacttctggcaattctggcattttacttcactcctaaatcaaaaagctggaatttctcccagcttctttttattttgcttcataccacgttttgccccaattactgtcggttaacaacgggacatctaactgaacagtgttctccatcacttctttgactaatttgtctaattgttccaattcactttctggaacttcgaaaacaagctcatcgtgtacttgcaacagcatcgtcgcctgtagtttttcctccttcaaacgttttgccatctcaatcattgcaagttttaagatatctgctgcacttccttgaattggcgtatttatggctgttcgctctgcaaatgaacgaagattgaagtttcgcgcattaatatctggtaaatagcgtcgtcgattataaagtgtggcagcatagcccttatctttagcctcacgtacgctttcttccatataacgttttacgtctggataattttcaaaatacgtatcgatatattcttgtgcggccttgcgcgtaattcccagattttgtgatagcccataatcagaaataccatacacaattccgaagtttactgctttggcatttcgacgcatattcggcgtcacttcatcttcagtaacattgaagacacgcatcgcggtactagtgtgaatatccataccatcacgaaacgcctgcttcaaatgctcatccccagaaatatgtgctaaaacacgcaattcaatttgagaatagtcagaagaatagattacccagtcttcatcacgaggaacaaaagcctgacgaatctttcgtccttcttctaatctaattggaatattttgcaagtttggatcaaccgaacttaatcggccggtttgggtcaaggtctgaatatagcgtgtatgaatcttattatccccttgaatcacttttaataatccttcaacataggttgattggatttttgcaatttgacgataatttaaaatatgttcaacgattggggcctgttcacgcagctgttctaaaacatctaccgctgtcgaataacctgtttttgttttcttaataactggcaaattcattttttcaaacaagatcacgcccaattgttttggtgaattgatattgaactcttcaccagcttcttgataaattttttcttcgatttcttgcaaacgtttcgagaattctccccgcatagcctgtaacgtttgtgcattaaccgtaattccggcaatttccatttctgctaaaatacgagaaaggggcagttccatttggtaaaacagcttatcttgtttcttctcttccaattctttctctagcttatcatttaggaaatgaattgccttaattttacgagctaaatgtccaaagaaaatttcatcatcttcaggcaacccttttttggctccttttccataaatctggtcatccgtttgaatttctgtataaccataatactgtgccacacccgcgatatcgttactgttatcattcgtatctaataaatacgcagctaataaaacatcaaagttgattccctcggtttttgtaatatagcgattcaatgccacataagtacgcttagcgtcataaaccttcttaccatttgctgtttcaagccatttcttaaatgcctcattttcaaacaaagccaattcatttgttacataaattttatctccagtgccccaagcgacacccacgatatctgataaatgataattgtcctctagcatttcaacatataaggcggcatcggcatcaaacatcttttcgttaaactccgtgacaacttcgaatttgatgtcctctaactcaacttcctcttcttccacgttcaatttatttaaaaagcctttgaaatccatctccttaaagaaaggaataagcttatccaaatcttttccgttataaactaattcatcaatggaaatttcaactggtgcatctaatttgattgtagccaattccttagataaaaatgcttgatccttatcattaatcaaattttctttcattttacttttctttagttcatcaatactttcgtaaacaccttcaacactgccaaactgcttcaataatttgattgccgttttttctccgacttttgttacgcctgggtaattatccgaggtatctccggcaagtcctttcatgtcgatgatttgatttggcgttaacccgtcatatttttcggcaacatgttccggagtgtaagattcgatttcactaacacctttaactgtaatatccactttaatcttatctgtcgctaattgcgttaaatcgcggtctccagataaaacaacgacatcatagccttcatccgctgcttgatgggccaaagttccaataatgtcatccgcttcgtaattgtccaactcataatgtttcacgccgagaccaactaataattcacgtaagtaaggcatttgctcgcgaaattcaccaggagtctttgaacgaccacccttatattcagaatacatagctgtccgaaatgtcgtgttgccggcatcaaaagcaactaatacatgggtaggtttttcacgctccatcacgttttcaaacatattgttgaatgcatagatcgcattcgtatgtaggccatttttatttttaaagcgctccaacgaattatgcaaggcaaaaaaagcacggaacgctacactgtttccgtcaactaataataatttcttttcactcatctcttcgactcctatttcctattcagggatttttttagaaatgttctataaaaattaatgaacgagactttcaatccttcacgattcattttaacaaagtattcgttgaaaagaaaagaatgaagctattttgttttcaatattcactagtccaaaaaaaagagacgattgctcgcctctatttactacttccaaaaattcgtaagaatgaaataaacagattaatgaaatctagatacaactgcaaggccataaagaccgcaacgccatttccaacttcaccatttgttccaagatagattttacgaatcatttgattatcataagctgtaatcccggacattattactaccattaaaatagaaataaagaaatctacggcaccgctgtgtaaaacaaaaacatttaacagcatcgcaatgataatccccaacaagcaacttaaagctgctcgaccaattccagataaatcacgtttagtaaaagaacccacaagtgacattactagaaacgtcgctgaggctgtaacaaatgcttgtgtcacagtccctagatcatacattgctaaggtgacagccagtgttaagccattcaaggcagaatatacaataaatccactaattgctaatgtaggatttttctgtgctttaataccaagaaaaaccactaaggcaatttcagcgatccagattccccaaaagcctagtgggaaattctgaataaaactgcccatttgatacgcccacggccctaaagtcatataggaaatcaccgcactgattccaatgcccaatgccaagaatgcatagatttttccatagaaccgatttaaaccataaacgcgtgcttcttgattattcatttatctcatctcctaattgtgcttgtggcggtttcaccattaccacagcatccaaaatgcgtttttcttcgttatccgttgcttctaccgcttcaacggaaatagtaacgacatctttcattttatctactttgattacttcaaactcaaaggttagtgtttcatagtgaaaaactggatcaataaaattaattgaaaaattcactacgtgagaacccggtcctggtaaatgtttagaaatcgcactcgtaatgatgcccattaacataatcgagggtacaagtggctgttcgtattcagtttcttttacatagtcatgttggatgtacaaaggatttgcatcatttgtcaaacctaaatataaaagaatctgattatcttcgatcgattccgttaacgataacgagtcaccttcctcaatttcgtcaatcgttttgcctattttccgagccttcatattatacaaattcattccctccgtcatttgttctattcattattttatcagaaagcaaacaaaacacaagtttgtacatattcaagtataaagatttatgcaataaataaacccgtgaatttcgccagatttgttaaaagaagggctctgacaaaaaatgtctgaacccttcttttatattataatacgttgcgtgtcgtattacttaataaatcttcgtatgcacgttcaaacttttgaacatctccagcgcccataaaaattacgacggcattttcatgatccaataaaggcgacatgttttcttctttgattacttgtccacccttttgaatcttttcacctaaatcttctatttttacatcccctgccgtttcacgagcagatgaaaaaatatcgcacagataaacttgatcggctttgtccagggcctcagcaaactcgtccatcaaagcaattgtccgagtaaatgtatgtggttggaaaacagcaaccaattctttttccggatatttttgacgagcagcatcaatcgttgctttgatctcagctggatggtgtgcataatcatcaacgataatcatatcagcaacctttttctcagtaaaacgacgtttaacaccagaaaaagtcaacatttcttctttaactttgtccatatctaaatcttcaaaataggcaaccgcaataacagacaaggcattaagaatattgtgcttaccaaatgatggaactgaaaaacgcccaataaatttttctttatggtaaacatcaaaggccgatccatttgttgtccgaacaatattgcgtgcctgaatatcatcgttttcagataatccataataataaatcggtacatctgcttttagtttacgtaaatattcgtcgtccccataagcaaaaattccttttttaacttgagaagccaaggtttgaaaggcttcaaaaacatcctcgatactcttgaaataatcaggatgatcaaagtcaatatttgtcatgattgaataatcaggcgcatatgccaagaaatgtcgttgatattcgcatgcttcaaaggcgaagaaagtcgcatctggaacaccatgtccagtaccatcaccaattaagtaactcgttggcgctaatccgtttaagacatgcgccagcaatccagtcgtacttgttttaccatgcgaacctgttactgcaatactagtatagggttgaataaattctccgataaaatcatggtaccgaacaatttctaatcctaattctttcgcccgagcgatttcttcatgggtatctggaaaggcatttccttgaatgatcttcatgccttccttaatattgtctttactaaatggcaagatcgtaatgccggctttttctagatcacgttgcgtgaaaaaatatttttcaacgtcagagccttgtacatggtagcccttttcatgcaggaccaaagccaatgaactcatgcctgatcctttgattccaacaaaatgataaagtatctctttattattcatttaatcctcttccttatatgtacaaaattgtttgcggttcacattatcatataaatccgtaaaaatagcaatcttttattcttcagattaccttgccacttcctatgattcaattgtcttcaaaaattctagctgtccatgacaacttccacaaacgtatcgttttgtatcaatttttcgacggcgcttaatttcttgatggcattttcgacactgatatacttgaaatgtgactgccacaagttttggagcaaatcgtgatccgccagtttttttcaacagctgtttaaactccagatccttgtgctgataacctcttcctgccagatgaagatgataatgacaaagctcgtgcttaattactttgattaattccacttcaccatatttttcaaaaagaatcgggttaaaatctaaatcatggcttttcaaatgatagcgtccacctgtcgttttaagtcgacgattaaagcgggcattatgacggaagggttgtcgaaaagaatcatgagagatcttttcgacgagagcctgtaattcctgattagtcatttttatcactttgaaccattgtcaaactgatacgtccttttttgacatcaactgcttcgacccaaacagtcaccacgtcaccaaccgaaactacgtcagttggatgttttacatactttttactcaatttagaaatgtggaccaatccgtcctgttttactccaatatcaacaaaggctccgaaatcaatcacgtttcgaacagttccttgaagctccattcccgcttttaaatcttccatcgtcaatacgtcttgacgtaataaaggagcgggcatttcatcacgcatatctcgccctggttgaagcaaggcttgcaagatatccttaatcgtttccttaccaatttcaagcttttgctgcaattgacttaactgtaatgctttgattttttctgtggcttccacagaacctaataattttaggtcaacctcagcaagatccaaaatttcttttgcactattgtagctttctgggtgaatggcagttgtatctaacacattctttgctccaggaattcgcaaaaaaccgatagcttgttcgtaagcttttggtcctaagcgaggaacttttttcaattgcggacgcgaggtaaatgcaccgttttcttcacgatagttaacaatattttgcgctgtcgttttgtttaagccagaagcatactgtaatagctgtggactagccgtattgacgtttactccgacttggttaaccgcggtctctactacaaaatctaaacgctcagaaagacgtttttgagaaacatcatgctgatattgaccaacaccaacagcttttggatcgatttttactaattctgacagcggatcttgcaatcgacgcgcgatgctgactgcacttcgttcttcaacctgcagctcaggaaattctgtccgggcaatgtcgctggctgagtaaacagaagctcctgcttcattaacgatcacataaaagacttcttgttgaacttgttttagttgttcagctacgaataattcagattcacgacttgcagtgccattgccgatcgcaaccatctcaacgttatactttttaattaacgcttgaaatgcaggtccagcagcttgtcgttttgcctgaggagccggcttgtgaggataaatcacttcaatcgctaaaacttttccggtttcatctaccacagctagtttacagccagtacgatacgctgggtcaaatcccagcacgacttttccttttaaaggtggttgcaatagtaaattgcgtaaattttcaccgaaaatattgatcgcttgttcatctgcctcttccgtcaattcatttcgaatctcccgttcaatcgcaggtccgatgaatcgtttatagctatctttgtaagcttcacgaacaaactccgcagtgacagctcgagtattctgcactaattgacgttcaagatattcatagattttttcttcttcgaccacgattgaaacttttaaaatctcttctttttcaccacgattggaggctaacacacgatgagaaaccattttgttgattggctcagcaaaatcatagtacatttcatagacacctttttcatctttatcggcatccttgaccttgctctgatacacacctttatttttcgtatacgaacgaatccacgtgcgaaaatcaggattatcgctaatttgttcggctacaatctcatgtgctccttgcaaagcttcctcagcattgacgatgttttcatttataaactcgccagctttagcatagacatcaccagattgcggaaagctcaccaaataattggctaaaggctctaacccgttttctttagcgatcgttgcttttgttcgacgtttttgcttatatggacgatataaatcttcaaccttttgaactttaactgcttgttgaattttcttagctaactcgtctgttaattttccttgctcgtcaattagtcgtaaaacttcttgtttacgcttttctaagttttccaaataattgtaacgttcttcgatttcacgaatctgtacctcatctaaactgcctgtcatttctttacgataacgagcaatgaaaggtaccgtatttccgtctgtaagtaatgtcaaaacgacattgatctgctgcggacgataatccgttaattctttattcagtagttgaatgatttcctggtttaaattctctgccatttcaattcctcatttcatccaaaatcttatctattttatcatatttcaagaaagattgcttattgatctcaagcaaaaaatggacgtccccatatgcgttcagcgtcaagaaatatgaagggttttctgaaagtactcctcaaaattccgatttatttctacagacactgcttatacgtcgccgtttattcgtaaataggagctgaccaaaatatctaaaaaattatggatcagcacttttaactctctttttttctttgctgtataaaattgggcagctctgataaaagcaaacctgtcaaagtcaataaaattccaatgaacgttttaagcgtcaacctctcacccaaaatcaaaacagaagctatcgtagtcagcattggaatggtgtaaatgtacactgctgctcttactgctccaagatttttgaccgaaaaattccaagttacaaagcacagagcggaagcaccaatgcctaagaaaagaagattacccaaactttccacttgcaaaaaacgagaaaaatcgaacttatccagcgtaataactaaaactggcagcataaacaatagaccatagaaaaaaatccgctgtgttgtagcaatagttccataaccaaactcgctaatttttttcactattaaagagtaggaagcccagcaaattgttgccaccaaagccaagccatcaccaatcggattaacattcagtgttcctgaaagactgatcaatgaaattccaatcattgaacaaataaagcctaaaataaaaacacgcgggatcattccttgcttcaaaacaaagcggctgatcaaggcagtcataaaaggactaaccgaaccaatgatcccgacgttcattgctaaagtataggtcagtgcgacgttttctaaataataatataaaaaaacaccaaataaaccagcaactatgtaataccgttcctctcgccagctcttaaagggcaagaatttacgtgagactattgttaaaacaagaaaaccaataagaaatcgcacgaaaagaatttcgattggtaaaaacaactcaagtagcaccttagtagaaataaatgtcaacgcccatatgacaacggtaaaactcgcggataaatgaccttttacaatatctgacatagtataaaagaatttcctttctcaatttttaacaattataaataacagaaccctacagcataatcctgcttagtacgatattaatcctaaactaattaagactctactaaatcactatgacattttgtaaagaattgcgcaatgcaattaacaaaaaaatgatactgagaccagaaggatttttgaaatcaaaaaaagcgaacgcttcaaaacttttaaattagaaagttttgaagcgttcagcttaaatagtgagatcttcactttattcttcaatgatacaaaatagtgacttcaataattgttgaatctttttgaacgttaaaaatctggttgccatggtccgtccgtattagggatttcgtaatcatgaacaatgccatttttatcaaaaaccaccccgtgcagagttccgccaaagactgctccaccatcaactccgatttttccatcagattgccaaagggctgtcgtttgcatatctccatatagcattggtgtaatagtatgaccaaatacaattgtttttcctgtattgtttttaccttcatgaaacggttcgcgaatccacaagaaatcttgcagggaggtttccttccaatcctttgtcaagtcaactccagcatgaacaaagacataattgccccactcataatagaatggacgttccgctaaaaaattcaacatatctttgtaccgactacggatcatcatagcaatctcagtcggtgaatattcatctgtcgcgcctttatgtaacaaactttcaatcgtttcttttccaccattataaagataacttggaaaccaatcttctggactgttcataaactccagaaaatattgctcatggtttccccttaaatagattgcttggtatttttttacaagttccattcctaaaagccaacagtctttacttttgggccctcgatcattcagatctccaatcaggatcaactgctgttcgtccggctgaaaattttttaagattgatctgaacatatcgtattccccgtgaacatcaccaattacaaaaacctgctccatctttgttcgcccctaactgaagaacgctttaattacctgatactacaaaataatttccatccgcatcaacaaaattgaataaaaactcttcgccaatttgagccaactctcctaattgaacatccaccttctgcaattttttgtacaatgccataacatcatcacttccaaaaattaaagcgggagatggctcagctgcttcatcatcatttttttcaataaattctcgatcgtagattaccagacgtgtcgtactattttgactcatcgctacttctgccacttgagaaccatccaattcttcaaaactaatctcgacaaatcctaaactttgccaaaaattactagctttacgtacatcatttgcatataaaattacttttacctgttcgttaaacaaaatattcactccaaaaaatacatattctaaatctacatacactcaatatatcaaagagtggcctctaatgctaatccaataaaaaatatctctcggtaaccaatgttctggtttcattgaagcactacggtcatttagctagactagcaagttgagtgtagcaaaaaagacttggtcgcgccagccaagcctttcatattaagaatttacttcaatcgaagcattttcatcatgtaaaatttcccggtctaattcatggatgcgttcactagttacgacgccagcaaccatactgccactgacattaaccgcggtacgagccatatcaatcatcggctccacagagattactaaaccaacgatcgccactggtaagttcatcgcacctaaaacgattaatgaagcgaaagttgctccgcctccgacaccagctacgccaaatgaactaatagttacgatagcaattagcatcacaataaatttcaaatcaaaaacatttacaccaactgtaggtgctacgattgtcgcaagcattgctggatacacaccagcacaaccgttttgaccaatcgagataccaaagcttcctgcaaagttagccgtagcttcatctacacctaacgctttggtttgtgtttcaatattcatcggcaacgttcccgcacttgaacgtgaagtaaacgcgaagctcaatgctgggaaagccttcttaaagaagttgattgggttcacttttacacctaacagaataatagaatgaaccaataaaacaacgatcaatgcactataagaggctaaaatgaacttacctaagttaacaattgcttcaaaatcactggttgctaatacatttgtcatcaaagcaaagacaccatatggcgttaaacgtaacactagcgtcacgatacgcataacaaccttatataagctttcaatcaaattcgcaaagaattccgcttcttttggtgcttttcgtcgaacacctaaaaaggcaatccctacaaaagccgcaaaaattaccacaccaattgtacttgttggtcgtgttcccgcaaaatcagcaaagacattagttgggatgaaggataaaatctgttgcggaattgaaaagttttgaaccattgactgacgatccgccaactctttgattcgagcagtttcagctgctcctttagtaaatgtcgcaccatctagtccaaagaccataacagccacaatcccaatcaaagcagcgattgccgttgtagccaataatgtaactaaaacattggcactgatttttccaagcttcttgcttgatttcattttggtaaaggcaccaacgatcgaaataaatactaaaggcataactaacatttgtaataatgaaatataaccattaccaacgattccaatccattccatcgcttgagaaatcactttgctaccattacctaaaagtaattgcaaaaccccgccgaaaacaattccggcgcctaatccagcaaaaacgcgattagaaaatttcacatgtcttttttgcatttggtaaaaagccacaagcaacgcaacgaatactagaatcactaatacagtgaacagagttgtcattgtattcctccttaaaatagctttctataatgacaagtctgtcaaaggaagtaaaggttcccggtatttgttcttcaacaaaataccctaaaatatagttgcgcgattcctaaattttagtgacctttaaattataacccagataaaataatctgtcctgaaatttgcatagtttcaaagaaattttcataatcatatacaaaaggacctctaccttaaaaaatgacgactaattggaaaataagtgtcagtttcaggtagggttccttttaaatggtattagatgaaaaattaattttaacgcctggtttatctaacgcaatctcagttatttcataaaccatacgttcaatcagtcttagtattggacggatcatctcattggcttccgcttcagtcaaatcattttgctgtttgacttgacgaccaatcacgtggatcacttgagaaagaactccgccaataataaattcctcaaatggaagaacaaattcgatccgcacccccataatactattttcaggtggatatccaggatctgttgcttccagtggactgaaattaatcagcaatttttgtttcactacctgatctttcggaggaagtccgtagttaaatgattctacgacctcctgatcgcgttgtaacttcattttacacctctcgctcgagttgaaataatgtttttaataaacagcttactcattaatagccttttcctaattatagctttctactcagaaaatttgtaccatttcttttaaattatttatagaataagtcgccttaacaacttggctaaaatgatccaaatcaagaaaaactgtttgcacaccagcattatttccagcttcgatatctaatttgcgatcgccaatcatcacagttttttcagattctaattgatagttatcaataaaataataaattgcacttggatctggtttccttggaaaattcgaatcacttccaatgatatcaacgataagcgaatctaatccgtctctttttagtaattgccaggttgaatccacagtacgatgagtcaaaataaaatgtctaccacccatgttttgcagtttttccaacgtctcctttgtctccttaaaaggaaaagagttcctatttttctgagcctcataactatgatactttcgatcaaaatctggtacaggtaaacgccaatccataatcatttgacggattgattcagttttgattttctgataaacctctttttcatctttttcgatcccaaattctttaaaagtttccatcaatgcttttaacatgattggatacgtatcatataatgtgccatcaaaatcccaaatataattcatgtcatgcctttctaagttaatatcctgtttttataaaatttctttttgtataattttcaattgtgagttgaaagtataaatcattggcgtagcattaggaatctcaatttgatctacttgattagtaggaacattttctaaaaactgaactaatgcacgcaaactattaccatgtccgcaaactaaaacagtcttctcatcaagtaagttcggcgcgatctgatcttgccacaaaggaagcactctctgtgaagtcatgtgtagactttctccagtcggtatcaatcgtgggtccaaatgattatatcgacgatcaaaatgattgtctttggctagtggagggacttcatcaaagcctcttcgccattttttcacttgttgggcaccgaaatgctccgcaatgatatctttattttttcccactaatgcgccatagtgacgttcgtttaagcgccacgtcttatattcaggaacaaaactcgcttctgcttcttgcaaaatcatttgagccgttttaatcgaacgttttaaaactgattcgaaagcaacatcaatcagtaatccatgattcttaatcttattaccagctgtcttggcttgctcaattcctttttcagtcaaatctacatccagccatccagtccaatagttttcaaaattcgcttcgctttcgccatgtcggactaatactaaattcatcttttcaccttctcactaaaagaataacagaaaaagcctagttttaaaaactagacctttttcacaaactgtgtgtgacaatgcttgcaggtcactttgattttcccacgaccttttggtgcacgcatcttttgtttacactctggacatttaaaataacgataagttccatttttacctttgaagaaatctttcatacgagcaagccactgaataaatttttgattttcattgcttcgcggataaatctttttcgaacaaaaacgataaagaaccagcacgaaagcagcaattgcaagtatatttccaatgtaaaacggaatccaacggtcaaaaatcatcatcacagcccatacaatgagtaaggctttattgatttgatccaatctaccataacgtccgcgcattaaatacgcatatttttggtaaaatttggtcaatcgctgtatccaaatattccccaatgatactacccctttctatgatcctacttattgaaaattttgggtcctttacgcatatttttacgatcatttttaggtgttgccatctttttagaacgaccgccaccctgtttctgtttgattagctctagcattttctctttttgattcattttttacaccgccttcacaaggagcgttactgattctacatgatatgtttgtgggaataaatctactggttgaactttcacagcatggtaaccaaggtcttcatatcttctcaaatctctagctaacgtagctggattacaagaaatataaataattctttcaggattaacagcaacggatgcttcaataaatttttcatccaacccttttcgtggtggatcaacaaaaatcaccgagggttcaatcccttctcgtgcccagcgtggcataattttctcagctttaccaacttcataattagcattttcaatcccatttttcttagcatttgctttcgcatcttcgatagcttgtggcacaatttctacaccataaacatgcttaactttttcagctaaggataaaccgattgttccgattccacaataagcatcaactacaatgtcttcagcattcaaatcagcgaattcaatcgcagtttgatataacacctcagtttgttctgtatttacttgatagaatgattggggagagatttgataaaccttacctagcaaggtgtcattgattgtcgatttaccaaataagaccttttcctcccgacccatgatcacattagtcttttctggattgatgttctgaatgactgaaacaacctccggtaactctgttttgatcacttcagcaatttcagttcccttaaagaaacgttctgttcgagtaactagtgtcaccatcatctcatggctataatgccctcgacggatgacaatatgacgaataaaacctgtgttttcacgttcattataagcctttacgttaaaacgtcttaagatatttcgcactgtaataatcgcttggtcaattttagggtcttggatgtaataatcctcaatcggcaataatacatgagaatttttacgataaaaacctgtcattaactgattatcgactttttgaactggaatctgagctttgtttctataaccaatcggattttccattcctaaagtagcggctacgctcagctctggcagttttgcgattgtttttagaaccttttccacttgttgctgcttaaaacgtaattgatagctataagtcatatggcttaaaggtgcaataccacttcttaataaatcctgatccttcacttcttggcgttctggatttgcgttaaatcgttcgatcactttaccatacccaaattttttaccgactttaaccactttgactgtcatttcttcctcaggtaaagcattttcgataaaaagtggatatccgtcaatgtgagcaacacctaacccttcatgcgacaagtcatcgattgtaacggtatatgtttgatttttttctactgtggtcatgttattctcctttaaggctgattcacttattctaatgaattctattagaaaaagcaaggcaacgcctgctatatctcccttaagacttttgtaagaatggaaggatttatttaccgaaaaaaacaatcccgccaaactgaagcgagattgttttttaaaattattcttctgtatcttcgtcttgaatcttctcgtattccttaacgagttcgatccctgcttctcttttttcattatcaggtcctaagatagccgcatcgtcaatctcatccgtgttcgcataaaactcaatgtgctgatgtagattttcaaagcgcattggtgcatcgccaccgtattccccatccaaattgatcatcatttttttgtcagtatctattaagctggcatctagaaaactggttttcacgtacaaaacttttgaatcgttcacgtgtttaccaccattcaatactaacgtaatcaagcggacaatttcaaaaagatttgctgttttcacaacaattagtgaaaatttcccatcatccaactttgcatctggcgcaatcgtttcaaaaccgccgatcgaattcgttaagcctaagaaaaacattgaagcattgccttcatattctccaccttcataaaccagacgcattttagtcggtttgattcgcggaagcatttctgcacctttagccaaatacgctaaataaccaaaaatactcttcaattcagaaggaacctcataggttaactcggttaatgaaccgcctgctgcaatattgatgaagtaagtatccgcagctttgccgatatccattttaacagtttgctgcttttgaataacctcagcagcagctttaacgttgctgcgaggaatttttagtgctcgtgcatagtcatttgttgttccagccgggataattgccattttaggacgttcttttaagccggcaatcccatttacaacttcattaatggtcccgtctcctcctgctgcgacaactagctcaaaaccagcctttgcggcacgggttgcttcatttttagctgaatcaggctcgggagtcgtagcaaaggcacttgcttcataacctgctttctcaatagcatctaaaatatccgccaaattagtgcgcatgatttcttttccagatactggattataaatcagtcgtgcttttctcatgatcgagctccctctaacgtttcgctaattcctcttgaagtaacttgttgactactcctggattcgcttttcctttagttgctttcataatttgtccaactaagaaaccaacggcgcgatctttaccattcttaaagtcttcaacggattgttcgttattatcaagtacttcattgatcattggcaataattgggctggatcagaaagctgtactaaacctttagcttcaactacctcttttgcatctccaccattttggattaattcacggaaaacttttttggcgatcttagaactaatcgtaccatctgcgattaatgtaatcataccagctaaattattcggcgttaatttcgtatccgctaattctagtttttcactattcaagtatgcagaaacctcacccattaaccagttagaggcttgtttcgcatccgcgccttctttcaaagtatcttcaaagaaatcagacatctcacgactcatagttaagaccattgaatcgtactctggtaaacctaggtcatttacatagcgttcacgacgagctgctggcatttcaggcaatgtttcacgaaccttttcaatccatgcgtcgtcgatttcgaaacgcggaatatctggttctgggaaataacggtagtcacttgatccttctttcacacgcatcaagattgtcttgttcgttccttcatcgtaacgtcgagtttcttgctgaatcgttccaccagaaagcaaaacttttgtttgacgttgtacttcaaaggtcaacccttttttgacaaaactaatggagttcaagtttttcaattccgtttttgtaccaaattcttcttgcccataaggacgcaaagaaatattcgcatcgcaacgcattgaaccttcttccatcttcacatcgctgacgccagtaaattggataattgagcgtaaggcttccaaataagcattggcttcttcaggcgaacgcatatccgcttcagaaacaatctcgatcaacggtgttccttgacggtttaaatcgacataagagtagccgccgataccatgcatattcttaccagcatcttcttccaagtgaacacgttcaatgcgaatttttttctttttaccattcacatcgatttcgatccaaccatcatggccaatcggctcatcaaattgcgagatttgataagcttttgggttgtccggatagaagtagttctttctatcaaaatgcatattctttgagatttcacagtttaaagccaatgcggctttcatcccaaattcgattgctgctttattcatgactggcaaaacaccagggtaaccccagtcaataatattggtattcgtatttgcttctgcaccaaagtgagcgggcgcaggtgaaaagattttagagtttgtttttaattctacatggacttctagcccaatgactgtctctaagttcattatttgtccccccctaaaatcactggtttttgcttatggaaatctgttgcttgttcaaatgcataagccgctttatacatagttgattcgtcgaaatgttttccgatgatttgcaatccaactggcaatccttctgagaaacctgcaggtacagacatacctggtagtccagcaaggtttacaggaattgttaagatatcatttagatacattgtgattggatcatcgatattttcaccaataccaaaggcaacagttggtgatgttggtccaatgattaaatcgtaatcagcaaagactttatcgaagtcttgtttgatcaatgtccgtacttgcccagccttcttaaagtaagcatcataatagcccgcagaaagagagaatgttcctaacatgatccgacgcttaacttcatcgccgaaaccttctgtacgagtgtttacgtacacatcttccaagttttggacatcttctgaacggaacccataacggataccgtcaaaacgttgcagatttgagcttgcttcagaggaagcgatgatatagtacacttctacgccatattttgaatgtggtaagctgacttcttcaaccgtcgcacctaatgctttaaaggtttcgaccgctttcgtgatcgccgctttaacgccaggttcgataccttcagccatgaattcttttggtaaggcaatcttcattcccttaatgtcgcctgttaagccagcagaaaaatcaggcacagatactccagcagaagtaccatcctttggatcatagccactaatagcattcagagccaaggcattgtctttaaccgtacgcgtaaatggtcctatttggtctaacgaagatgcaaacgcgatcaatccaaaacgagatacgcgaccataagttggtttcataccaacgacaccattgaatgccgccggttggcggatacttccgcccgtatcgctacccaatgaaacaggaacttcgcctgcagcaacagctgctgcagaaccacctgaagatccaccaggaacctttgtttgatcccaagcattttttgttttcttaaagtaagatgtttcacttgagcttcccatagcaaactcgtccatattcaattttccgactggaatcaaatctgaactgtaaactttttccataacagttgcatcataaataggatcaaaattcgataaaattttagatgcggctgttgtcaaaagccctttcgttacaatgttgtctttgattccgattggaataccagccaatgcattgtcattggtaattcctttaatatcaatggcttttgccatttccatcgctttttcttcatttaaagtaatgaaagcatcaatgtccttttctgtttctttgatgcgagcaaaggtttcacttgttaaatcagtggctgtaatttcttttgaaactaacagactgtgtaattcttcaattgatttatcgtataatttttccattatgcaccagcctctccgttgtcaatgatagccggaaccttgatgaatccatcttcgctttccggaacatttttcattaactcatcgcgtgaccagccttcatcagctacgtcttcacgcataacattgattgtttctaatacattggaagtaaatggcacgccttctgtatcaacttccccaagttgttcgaccatgtcgattattttgcctaattgatccgtaaaaccggtcaattcatcatctgaaaaagaaagcttcgcaagtttcgcgacatgttttacttgttcttcattgattgccataatatccctctttcatttgtcaattttcaatcattttatcatatctctgttagaattcacggttttttcttgaaattttttgaaaaattgttcaattcaaaaaatttgaaaatagagtcattctaatagctttaacgtctttttataatacctgttcgttaatcgaaacgtcaacaagcttctagacaaatttgtctagtctgtgtgactttcttcgattgcttgaatcatttgtttttcattccaaatttcaattcctaaactttgtgctttggtcaacttgcttccggcatcttcaccagcaactacaatatccgtttttttagaaacgctgccggtaaccttaccacctagattttgaattttttcttttgcgtcttcccttgtgtaatcgacaagcttgccagtcaggacaatcgttttatctttaaaaggcgattcgatttctgctaattgactcgcacgaattcctttgtattcaagatttactcctctatcagctaattcttgcattaattcatgaacttcttcgttttcaaagtaggtcaccaggctgtcagcaatcgtttcgccaattgtattcagactaacaatttcatctttgttagccttactaatagcttcaagactgccgaaatgctcagctaatattcctgctgctttcgcgccaacatgacgaatccctagtccaaagatcaaacgttcaacagaattttcccgactagcatcaatcgcctgcaaaatattttcagctgatttatccttaatcttgtccaatgtcagtaattgctctttttctagcgaataaagatccgcaacatcagaaaccaaccctttatcgaacatttgcgctaatacacgcggtcccagaccttcaatattcatggcattccgggagacaaaatgactcaagccttctttaatttgtgctggacattttggattgatacagcgcaacgcaacctcttcatctaaatggactagttcgcttccacaaattggacaatgtgttggtactggatagggttcgctgttatttggacgtttttctaaaataacttgcgcaacttctggaattatatcaccagctttatagactaaaattgtatctttcaaccgaatatcttttttctcaatgtagtcactattatgcaagcttgctcgtcctactgttgttccagctaaacgcactggttccatgattgccgttggcgtcaatacacccgttcgtccaatggtccaatcaatgtctaatagcgttgtttgcgcttcttcaggcgggaatttataggcggttgcccatcttggcgccttcaccgtaaaacctaattcatcttgtagagtaaactcattcaccttgatgacaattccatcaatttcatatgataattgatctctcatctcatgaaatttttcaatatattcccagacttcgtcaatcgtctcgcagacctgatgttcaggatttgttcgaaagcctagccgggacatctcatttagcgcatgatcctgagtagttgattctaacggaccaaaatctgctaaagtatataaaaaagtacttaaatttcgttgggcggcgatacgagtgtctagttggcgtaagctccctgctgctgcattccgaggatttgcaaagacctcttttccatcttcttctcgctgctgattcagtttgataaatgaagctttcggcatgtaacattctccccgaacttcgatcgtcaacggttcctttaagcgtaagggaattgatttgaccgttttcaggttttcagtaatattctcaccaactgttccatctccgcgagttgccccttgaacaaagactccgttctcgtattttaatgagattgaaagtccatcaatttttaactccacacaataggaaactggatgtccaatagcttttttgactcgctcgtcaaaggccatcaattcttccttactaaagacatcatttaaactatataaaggaatatcgtgaacaactttttcaaagccttctaatacctttccaccgacacgttgagtaggcgactcaggtgtgattaaatcaggatattctgtttcgagctctactaattcttgatattttttatcgtaaacaaaatcctccaccgaaggctgatcttgcacgtagtattcatacgcatattgattcaattcgtcgcgaagctctgctgaacgcttttccgctgcttgaaaagtcattggttccaagaagatccctcctaattattacttatactttttgaattggcgcaaaggctgccagtagacgtttgacaccttgctgtggaaatgcaatatctaactctacatcttttgcgttgccgctaacttttacaactgtgccagttccccattttttatgttgaactttatccccaggattccaattctcattttctccgccagatgctgtcttattcgtcatcggttgtcttgttgcatgctggtacttaggcttcatggcatttggatttgaagtaaatggattgttgaatgtagctttaggttgtggctgcattcccactgaattcaacaggctatcatcaatttcagcaacaaaacgtgaaggctgattgtattgtgtttttccataaagcgtccgagaaaaagcatttgttaaatacaagctttcttcggcgcgagtaattcctacgtaagccaagcggcgttcttcttctaattcggactcttccatcaatgaacgagagagtggaaatattttttcttccatgccaattagaaagacgattggaaactctaaccctttggctgcatgtaatgtcatcaaggttacttgtgcactctcttcttgataatcatccaaatctgaaaccaaagctaaatcgtttaagaaaacagcaagtttttcttctggcgcatctgcttcttcatcatcctgtacttcatttcgtttatcaaattcttttgtaactgttcgaaattcttccaaattctcaagacgggattccgcttctaaagttctctgattctttaattcatctaagtatcctgtccgctctaaaacttgatcaactatatctgttactggtaaataagcgaccatttcctggaattgcgtaatcattgtaccgaattcgccgatcatccgcccagctttgccggaaatatttgctaagtcgacattttgtgccgcttcaaccatcgaccagtcatgcatcgctgcaaaatttcgtaacttctcaactgaagcagcaccaattccccgttttggtgtattgattactcgttcaaagctgacaccatctctcgggttgttaatgatatttaaataggcgatgatatcttttatttctttacgatcatagaacttatgaccaccaaccattgtataaggcacattagacttaactaacgtatcttcaattacccgtgattgcgcatttgttcgataaagaactgcaaaatcattgtaactgcgattattggtttgaatttcttctttgattttactgatgatgaattgcgcctcgtcacgttcactatccgcacgataataagtaatttgttctcctgcctgattgtccgtccaaaggttcttatctcgacgattactgttatttttgattacttgattggcggcatctaaaatacttttagttgaacggtaattttgttctaataaaataacggttgcatcattataatctttctcaaagtctaagatgttttgcatatccgcaccacgccaaccgtagatactttgatcagcatcaccgactacacatagattacggaaacgcgcagccaacatattaaccaatgtatattgggcatggttagtatcttgatactcatctacgtgtaaataatgaaatttattttgataatacgttaaaacttcatcgttatcctcaaataatcgaatcgtattcatgatcaagtcgtcgaaatccatactctggttatttcgcaatgccttttgataggcatcataacaacgggcaacgatttcttcaaaaaaagaaccttgacgttcagcatacgtttctggtgtcaacaattcattttttgcattgctgatacttcctaaaatcgaacgtggatcatattttttagggtcgatatttagttcttttaaaattcgtttcatcaatgttaattgatctgagctatctaaaattgtaaagttccgatcataaccaatcgcatcgacatcacgacgtaaaatacgtacacacatggaatgaaaagttgaaacccaaacatcttctccgccttttcctaaaatcccgcttacccgttccttcatctctcgtgctgctttattggtaaaggtaatcgctaatatgttccatggattcacgtttttttcttctattaaataagcaattcgatgtgtcaaaactcgcgtctttccactccctgctcccgccataatcaataacggtccttcggtatgaagcaccgcttctttttgcttagggtttagtcctgctaacaactcctgtttgtttggcatgcaaaacgtcctttctttattcaatcttttttattatagcatctcagaaagtttcgcgacactagcaacattttaaaaaagcgaattcattgattcatccttgtatttctcagaaaagcgcgttaaatttaataaggatatgggaggaaatcatgaaaaacgaacatgaaatcaaacgtttagatagtacaaaagtaatttttatattgaaaggtattctgattggagcaatcgcaggaatcattgtcagtttgtttcgcttactgatagaagaaatgatggaacacatggtcacactttatctttggcttcgcggaaatccggtttggattatcccttgggctttaattatgttggtttgcgcctttattgttggcagtttgattaaatcagaacccaatattaaaggaagcggaattccccaggttgaaggcacgcttcagggggagattaagctgaagtggttttcagttctatggaaaaaatttgttggtggcgttctttcagtaggttcaggattattcttaggtcgcgaaggtccttcaatccagttaggtgcgatggtaggtcaaggtttcagtgagtatacaaaggcatctacctctgaaaaaaagatttttatttctagtggagctgctgcaggcttaggagctgcttttaatgccccgattgctggactgttatttgtgattgaagaggtccatcatcatttttctcctttgatttggttgacttctctaacagcagcattgaccgcaaatttaatttccttgaactttttcggcttaaagccggttttgtttattgctaatgttccttcgttacctttgaaatactatggtttattaattcttttgggaattattttaggtattctggggtatgtgtatcaagttgtgcttttatctttgccacaactttataaacgcagccatttgccagaacatctgtatggcattatcccatttttattgattattccaattgcactttttttcccccattatttgggtggtgggaatcaaattgtgttatcaattggtgaacaagtttttccgctgattgttttaatatcattattcgttttacgatttattttttcaatggtttcttacggcgcgaatcttccaggcggtatttttttaccaattctgacgttaggtgctttgattggggcaatttatggaactatcctgcatcgatggttcggaatggacccgatgctgatcagagattttgcaatttttgcgatggcgggatattttaccgctattggcaaggcgcccttaacggcaattattcttgtgactgaaatggtgggaaatattactcatttaatgccactagcggtttgttctttaactgcatatgtcatcaacgatttgttaggtggtaatcctatctatgaatcattgcttgaacgtttattaaacgggcatctgccaagtattaccggaaataaaacaatcatcgaattcccggtgactgccgaaagtacgttagatggcacaatggttcgcgattttaattggccaaaagaaatgctgttgatttcgattagacgtggctcttctgagatactcactcatggagatacagtcatgaaagtcggtgatttactaatgatcctgacagacgagggttacactaaaaaaatcaaaacacagattcgcgaacgttctgatgcagcgattgcaaaaatacaagataaaaagatcaaagactaatcgtattttttgagaatactaataaaaaaagcgaattatcataaaactatcccatatggaaaagagttatgattgttcgctttcttttttatatggctacttaaaaaactcaactattgtaacactttcttcttaattaattatcctcgtattttttgaaccagtttctcattaacataaacagaaacttgcccatcatttactggaaatacaccttgtccattttcatccaaaacaacttttgcctcgttatttcccagcaaatcaacaaatgtttctccctcatgaatagcgctaacggtcatttctttctcgccgcctttggcattcgtcataattatagcagctccagagtcactatcatcaaaatcaccggttagcgtccaaccaataacatctggatcgtcaaaatagtctgcctgatttccaaagtttaattcttctcgcaattctattaagttagtcagaccagagcccactgcttcagctttttcggtaccataaagatcgccccagaagacaaccggagttccttcatttctcagtaaaatcaatgaataggcatgtagcttgaaccagccctctatccaagactccaaactttgcccaagttgggtatcatgattgtcaacgaaggtaacagcccagtcgggtcgagtctcaatcaaggttccagcaaatatttgccgcatatcaaatccacccatcgttgaagcggcttgaaatagattgaagtgcaatggtacatcgaaaagtgaaatcaaatttcctgatgaatcaagatattcctgtaacttatccagctcatcagaccaatattcccccacaacaaacagctcttcgcctttttcctctctacgatgcaacaaccagtcaacaaaaagatcaaaacggatatgctttaccgcgtccaaacgatagccatcaacatccgttaattcttgataccatttcccccacttatctagttgctctatcgtatcgggattctccatgtccagattacatcccattaaatagtcaaagttgccattctcatcatcaactttcggtgcccagcccttatttgcaaaattaaaaatcgcatgatctttttcacgagcatcataatcaacaccagaaaaatttttccaattccattgatagtcgttgtatttaccttgacgtcctgggaaagtaaatttcgtccatgcttcaatttcttccttgccagagcttggttgtgttcgatcatcaaattgataagaaacagctgagaccacttccgtctcatcagctcccataaaatgatcgaaaacaatgtccgcataaattttcagtccggctttcttcaatgcagtaatactgctcaaatattcttcttttgtgccatattttgttctaacactgcccttttgatcgaactcaccaagatcataaagatcgtaagttccataaccaacatcattggcgccctctgatcccttataagcgggtggcatccaaacagcattgattccaaagctacttaattcttctgctttttctgctaatgttttccaatggttgccatcgttaggcaaataccactcaaatccttgtaaaatcgtttgttttcccataaccttcacctcttatatctatcataccgaaattaatgaaagcttcaaaataagacgaaccatattattaagtttaaacgtttttgaatgtttttggtcgtttttgattgtcttttgaaaatatttatgttactatttcagttgaaggaggattgaaaatgcttacagaagaaagacatagaaaaataatcgagtggttggaacgtgatggattagtgaaatctcaagatttgattcaatggttggactcttccgaatcaacaatacgtcgagacttacaagaattagaaaatttgcaaatgctggagcgcgttcacggcggtgctaaacgtccacagcatcttgaacaagaactaggcatgttcgaaaaatcatccaaaaacgttcaacagaaaaaaatgatcgctgaatatgcagctgaaagtattactgagggtgatgtcatttatttagatgctggaacgacaacctctgaaatgattccattccttaaaaatcgcacaattacggttgttacaaactcagttggcctcgccgctcgactagttgaagcacaaatcgcaacaattgtactaggcggacgcatcaaactgacaactgacgcagtcgttggctcacaggccttagaacaattgaaacagtatcgttttaacaaagcgttcatgggaatgaacggagtccacttagatagcggctattccactcctgaccctgaagaagcaattctaaaaagaacagctattcaacaatctgaagaagcatttgttttagttgatcacagcaaattcaatcaaacaagttttgtcagtgtcgcttcattgtcagcagcttcgatcctcaccgacacctgtcctttggttatccatgatcaaatcacagaacaaactaccttgaaggaggtttctgtatgatttatacagtgacactaaacccatcaattgactacatcgtccatgtcgatcaactaactatcggcgatgttaatcggatgaaaagcgatttgaaactgccaggaggaaaaggcatcaatgtttcacgtattttaaaacgtattgataacgattctaccgccttaggctttgttggtggatttactggacattttattgagaaatggctaaaaaaagaaagcattcaaacaaacttcacaccagtttccgacgatacacgaatcaatatcaaattgaaagcaaatgaagaaaccgaaattaacggactaggtccaatcgtttcaactgaagaaatgcttgaactgaaaaaagttttaggaagcttaaatgcaaacgatatagtggttttatcaggaagtaagcctgctagtgttccaacaggtttttatcaagatttaattgaaatcattaaagcacaaggagcctcatttgttattgataccactggtgcagatttgatggatgccttagaaaagaagcctttattagtcaaaccaaacaatcatgaattggctgatctatatcaaacgacttttacgtctgttgaagacatttttccatttggtcaacgtttactagatgaaggtgcgcagcatgcactcgtttcaatggctggtgatggcgcattattatttactagcgaaggagtctatcagtcaaatgtactaaagcgggcagtgaaaaattcagttggcgctggagattcaatgattgcgggttttgttggaagcttcactaaaactcaagatcctgtcgaagcctttaaatggggagtggcctgcggtagtgctaccactttttcagatgatttagccactgcagattttattcaagaattactaccagaagttgagatcaccaaagtaaaataattcagatctccccttctgtttgaacacattttataacaattggaggaactataatggatattaaggacttattgatcaaagatgccatgattatggatttgcaggcgacgactaaaaaagccgctatcgatgaaatggttcaaaaaatgtatgatgctgggcgaatttctgatgttgatgtctacaaagaaggtattttaaatcgtgaggcccaaacttcaactggcttaggtgatggcatcgcaatgcctcatgcaaaaaacagtgccgtcaaagaagctaccgttctatttgcaaaaagtaaaaatggtgtggactatgaatccctagatgggcaacctacctacttgtttttcatgattgctgctccagaaggtgctaatgatacgcatctgcaagctttggctgccttgtctagactgttgatcaatcctgacttcgtcgctaaattgaaagctgccgaaacacctgaacaggttcaagcaacttttgatgcagcagaaaaagcgaaggaagctgaagaaaaagcagaagctcattcggaggctgaagaaaaaagcaaagatactaaccgtcgatatattgtagcggttacagcgtgccctaccggaattgctcatacttatatggccgaagatgctttaaagaaaaaagcaaaggaaatgggtgttgatatcaaggttgagaccaacggatctgaaggaatcaaacatcgcctcagtgatgaagatattgctcgagcagatggtgtcattatagccgctgataaaaaagtggaaatgaatcgttttaatggcaaagaattagtcaaccgtccagttagtgatggtattcggaagccagaggaactaatcaatttagcattaagtggaagtgcccctgtctaccatggtaatgctgaagaatcttcagctacggaagagaagagtgataacggaactttaggccaacgtatttacaaggatttaatgaacggtgtttcccatatgctgccatttgtaatcggtggaggaatcatgatcgctttatcattcatgattgaccaatttatgggagttcctcaatcggaattggcaaaccttggtaattacaaccaaatcgctagttggtttaaccaaatcggcggcgccgcatttggattcatgcttcctgtacttgctggttttatcgcatcaagtattgctgatcgtcctggcttaatcgctggatttgccgctggagcgttagcaaatactgggggtgctggatttttaggcgcattaattggtggattcttagctggttatgtcatcattttcttgaaaaagatctttaaaaacttgccgaaatcacttgaaggtattaaagcaattcttttctatccgttctttggtttgatgattactggattcttaatgctcttagtcaatgttccaatgaaggcaattaatgatgggttaaatggctttctaactgggttaagcggatcaaatgcaattttacttggtgctttgcttggcggaatgatggctgtcgatctgggcggtcctattaataaagcagcttatgtatttggtacagcaacacttgcgacaagtgtcgctcaaggtgggtcaatcgtaatggcagctgttatggctggtggaatggttcctcctttagcaatcttcgttgcaactcgtttattcaaaaacaagtttgaaaaaagtcaagtagacgcaggattaacgaacattgtaatggggctctcattcgtaacagaaggagcgataccctttgcagctgccgatccaattcgtgtaattccaagtttcgtagttggttcagctttagctggtggtttagttggtgctgttggtattaagttactcgctcctcatggtggtatctttgttgttcttttattaagccacccactactttatcttttgtttattatcattggagcgattgtttcaggtgttatctacggtttagtaaaaaaacctattactaaataaaaagaaatccactctcacaaaaaattgagagtggatttttttacatccagcgatcttttctacgcgctctgactggctgaggttttggtttgatagaaaaaagaatcatcccaataaagaggacaataattgacaaaggaatttctagtgacggaagcggcaacgcaaaaattactcctacaatcagtaagcaactacccataatcttaatatacctgtgatccatagataacctctccttttcgtattcgtatgaatgaaataattttttaagttacataccaaccattacttactaggaaattcaagttcctctatatttcaagtatgtctaattgattttttgcggacactttcttttgatcaataaaggaaacaatcagatgtttggcttctttttctaacgagaatgtcaacgaatcatttttacgactaacttgatgaatcgtcatatcttttagtgcggatttcaactcttctaaaggaaaatccaaaaaagcttttttcggaataaacaattgtaaaacagcagtatagtctttataacgcatatcctgaatttcaaattcgattgaatcacggatataatattcaaaagcggctaaacccttatccaaggttagctcaggatataaaatatgataattcatcattcgttcactttcatcatcaatccaaggaaaataggctagagcatttagaccacctttcattcgattcacgcgatattggttcgttaaaaaattgtaagtgcgtgtcacaaaataagatgcctcactcttctcagttggttgaaattgttcattttgatattgaacagtttgaatcacagtatcttcaaaagcaaattcaatgtagggctgttttaataacccaactccattggtataggataattgtgaaattccaagttgatctcggaataattgttgaaatttcaagtttgccttttcttgccattgaaaagggtctttgtacaattcgaagaaaacaccagatcctaattcagctactctttccacttgctgaatctctagcaatagttgcttagcgaataattttttataaggtgctcctaaaaatagccaccagcaagcggttaaacatactcccttataaaacacatcatagccgggaaatacgttacaatcgacgactatatctccattaaggcctttcatctttggtagcacatttgtttctttagctgtttcaaaagaacgacgttcagataaatcacttgtattatgataaagatattcatcataggaacgaatgtaagcaaaaaaaccatggtcaatcaagcggttcttcaggtaatccagatacactctttcccaataataaaaattcttttccttgatgatatacttttcaaataacgtatcacttaaaagatgtagagttgtttcctcttcagaattcttcaactgcaaccagaaatcttccttcatgccaaagctcgaaatcacccgcttcaattgattctgatcaaataactgctcttttccgttaatcaacattttgtctggttccagcaataggcgactcatgactaaccaatcatttatctttgattggatgtcggcttgcttcaaatcgtaaagctggctgacactataaatcttttgatttttttccattgctttcccctttctcatcactctattataattatatcgtaaagatttaaaaaaccctatgaaattgattactaagttttaaaaaattgtatactatagtagaatatgataaaactaaaatggaggggttcagatgggcctgaaatttgaaaaaaccgatgatttagataaattatttgaatcttttgcggtagatccagacaaaaaagttcaaaaagacgaagatatccaaaaatttctaaaaccaaaaaatgaacaaactgataaaaaaaaggattaggcttcttaggcctagtccttttctattgctgcttcaattgctgcccatgcttcttcttttcctttttttgtctcagatgagaaaaggatgaatgtatcctcaggatcaaaatctaattttttcttgattgcactagtatgcttgttccatttaccacgtggaatcttatctgcttttgtcgcaaccacaatcacaggaatattgtagtatttcaaaaattcatacatttgaatatcttccttacttggatcatggcgtatatcaactaaagaaactaccgcacgtaactgtttgcggctggtaatataggtttcaatcatctcaccccacttcgctctttctgttttcgataccttcgcatagccatatccaggtacatcaacaaaatgtagcgcattttcgatgagataaaagtttaaagtttgagttttccctggtttccctgaagtcctcgctaaattttttcgatcaatcaacgtattgataaaagaagatttcccaacatttgatcgtcctgctaacgcaatctcaggtaaatcagtttcaggatactgttttggcgagaccgcactaataacgatctctgcattatgcactttcattccttcacgcctttcaaaaagaggtggtgacagaggtggtcagcttcaagaaataagaaggaatttccgaaaattatttctcaaatttttgtgaaatttcgacttatttccgaagaagctacttctggaacaccgtttattcggaaaaagaagctatgacaagacttttgtcacagctcctgctttactaaccagcttttttcttattgttatggtattcaataatcggtttacccgagccttcgacagaatccttcgtaactattactttttcgatcgattcatcagaaggaatatcaaacatcacatccatcataacatcctcaatgatagaacgcagaccacgagcacctgtattacgtgcaatcgctttgtccgcaattgcattcaacgcatccgcatcgaaagataaatctgtatcatcataggaaagcaatttttgatattgcttcactaaagcatttttcggttccgttaaaattcgaaccagatcctctgttgtaagtttttctaacgcagttgtaactggcaagcgtccgataaattctggaatcagaccaaatttcaatagatcttctggaataatctgctgcatgatacttgcatcttcatcaatttttttattatttttaccaaaaccaatagttttttcacctaaacgatttttaacaatcgtttcgattccatcaaaggctccaccaacaataaacaaaatattggtcgtatcaatttgaataaactcttgatgtgggtgtttacgtcccccttgaggcggaacactagcaaccgttccttcaagaattttaagtaacgcttgttgaacaccttcgccggaaacatcacgagtgattgaaacattttcgctcttacgcgtaatcttatcaatttcatcaatatagatgattcctttttcagcacgctcaacattgtaatcggccgcctgtaacagcttcaacaatatattttcaacgtcttcaccaacataacctgcttcagttaaacttgttgcatctgcaatggcgaatggaacatttaaggttcttgccaaagtttgtgccaaaaatgtcttacctgaacctgttggtccaatcaaacagatattactcttttgtaattcaacttcatctagtccatcgttttcagtattcactcgtttataatgattgtacaccgcaaccgacaaggccttttttgcccgatcttgaccgataacatattggtttagaacatctaataattcttttggttttggtacatcaataaattcacgaatagcttcttcatggaattcttcatctataatctctttacaaaggtcgatacactcattacaaatgtaaactcccggacccgcaacaactttttttacttcttcttgggtctttccacaaaatgaacagcggactgtttcacctgcgcctgtgctctcatacatggctttcacctcttgcttctttctctacaagtgtttccacgattgcagtctttatctataataacacaaagcattaaaaagacaaagaatccaagtggaattaaaaaggatttctaaagaaaaaagttctcgaaaatcgagaactttcctttattttgcataccaagctaagccttcatatttccagcccttttgcactaagttattcttttcatttgtattcaacgtataatggtgagaacctgcttttgcatttgggttataaagacggtgcaatgcatttggtcccccagaataccacgaaataccttcataacgccagccttttttaatcaagttgtctttctcataagcatgtaatgtataatgatgatctcccgcgttcggattatacagacggtaaactggattccctgatgttggtccattccagcctataccttcgtatttccacccttttgaaaccaaattatttttttctgcgacattttgtgtataaaagtgctcgccactattcggattataaagtctgtacatctgaattgaatttgcaggtggagtcgtttcaggattactgaatgttttcgtataatctgcattaatatcaaaatttccgctgatacctgggaatgatagttgtgaagaccattgccatgctccatattgtgtatagaaatttgttgtagaaagattatatggatacgcagcgacccatatatttttattcccaattacagaagcattgattcgtcctgttgttaaccagttcaagccaatatagtgacgaacatttccatagcctaagcttttcaattgattctcaaaagctctagaattattggtatgattccctttaccaagaatttgaggttcttcaatatcattaaccatgacagtaccgctactcaaaccaaatttcttagccgcagccgcaaaatagtttgcttctgccttagcctgtgcatcagtagtaaaccaactataatgataggcggaaactttcattccagcagccatagcgttattaatctgtgattgcgcataaggattcgtataactggttgcttccgttaatttgacaaccacgcctgtgacaccgtaacctttcattttttgaaagtttgcaacagaaatatttccattatgcgaagaaatatctataaagcttttgcttggtgtattcgtatttgaagctgatacagacggtaatgcagcaaatagttgaatcgtaggatacagatcagaacgcccctttggcaaagacatcgtcccttcagccgtttcaatctgtgtctcaggtactgttaccttttcttcagtgctctctatagtttgttcagaattacttgtctcagttgtttcggaactactgctttcatctgtactattaattgaggtcgtctcactgatttcagtactatttactacttgactctcctcggcgaaaactgttgttgatagatttaaacataatactgataaaaaacatagtccaagaatctttttcttcatattctcctcctcaaggttcataatccctttaacgctctttttaaaaaacttcaaaaataaaaaaacaagatatagtatcaattcattaataattcaatattaccaaatttaagtgtttttttgaagttattcattatatttatcgatcagaaagtgaaaaactaagttattgaaaaaaaaagtatgcaacacaaaattgtgttacataccaatttactgctatttttatcccttttgctaaacaacaaagaaaattaaaaaactatttttctacagctgttcctgtcactaattcaactgcttttttcattttgatgtcatgttctagcatatcttctgtcaaaacacgcttgatttgttcttctggcatttgatacatttctgctaaatctttgatttctttagcaatatcttcttcagatgcttcaattttttctgcttcaacgatagcttccattaccaagtttgtttttactcgtccttctgcttcgccttcaaattgtgtatgaagatcttcttcagtagaaccagttaattggtaatacatttctggagagattccttgacgttgcatgttgtttaaaaattcgtccattgaacggtgtacttcatcatgaaccatcacgtgaggaaggtcaacgatttcagcattttcaacggcttgtttaatagccgcttcgtctttcgcttctttcgcagcttcttctttttgttttgttaattcatcacggtattttgcttttagttcatctaaagaattcacttcttcatcaacatctttagcaaaatcatcgtctaattcaggtaattcctttgcctttacttcgtgaatcgttactttgaagatcgcttctttcccagcaagatcctctgcttgataatcttcagggaaagtaacggttacatccaaactttcacctgctttgtgaccaactaattgttcttcaaagccaggaatgaatgagccagagcctaattcaagtgaataattttcaccttttccaccttcaaatgcttcttcgccaacaaagccttcgaaatcgataacagttgtgtcaccattttcagcagcttcatcttctttgataactaattcagcttgagattcttgttctgatttcaaacgtgcatctacgtcagcatctgaaacttcaacatcttgcttaggaacttcaagttctttgtaatcgcctaatttcacttcaggttttactgtaacttcagctttgattacccaagcttcgcccttttccatgctatccacgtcgatttttggttgagaaactggatcaatacctgcttcttttacagcagtttcataagctactggtaaaacgtcgttcaatgcatcttcgtatagcgcttcttcaccgtacatacgattaaatacttggcgagatacttttcccttacggaagccaggtacgttaagattttttttcactttgttgaatgcatttgttaatcctttttgaatctcggtttgttcaattgagaaagttaacacaccatcattggtgcctgttttttcaaaatttgcagtcaaatttgttccctccgaatactaatatacttgcattttgcataccattaaatattacactactgattgtgaaatgtaaatataaagcttttactctaggcattttttaatgataagcgaacatcagttgttttatcttttttcgaatcgtttcaatcctctcatcaagcaactctgagctatttcgataccctgaccaatactctgataagtagctagccacccaagcttcaggttccataaatgatctttgcaatggatataagaaggccatttccaatttcacttgctccaatatatttgataaaagtattggatcttcgtcgcttaagtgctcatccaaacggattgagatttcattttggagagtttcatctactcctgtaatagctggtgacaactctgctatctcatctaagaacgtcaaatagtgaaccttctcagaaactcctattcgcgctaaactttcaaataaatagctgcgtactataggcgttactttgggttccagcataaattttttagcccatacttgcagacgttcctcagataattgcttgatcgctctaactgaaaccagttgttccattggcgacaataacggtaactgtcgaatctctgattcaagctgctccatgatagcctgttgctgtttttgataaaaaaattcttgatcctcaatgcgcatcaaccaaagatttctctgttcttctgttagctgtttcatcttttgagcccgccataaaaattcacgagctgcaaaaaatctgtgtgagtacaattgaatttgcaaataaagatctattgtctctggtgcttcgagataactgtctggttcctcctcggaaaacgctaaagcctcttcaaaatccccttgttctagggaaagattggcaattagatggtttagtttagtcgaaggattctcttgataggcaagtttgtagttttccaacgcttgtaaatagttccctgctgaaaaagcctcttcagcaagagttaaatagtaatgatcgttattaggaaattctattggattcatccctgtgtaaaatcctctctagctgcaagtaaatttaatgtaacaacactagtatctgagaaataatcaccgatatgttgcttgtttggtgtaaaaattgttacaagataacctaacataaaaaccgagcctcgcaaaataaaacgacaagcacactcacgcactaaaacagtttgccagctcaattcttcttctgtaaagcagacgactcgaatcccaaaaatcatctttccaatcgtttgcccgttgtttaattttgtcagcagcacaaaataagctaaataaatagcaagtgttaataacccgtaaatactgaacaattcatcattctttgttaatccaaacaaatttgcaggtaatcctaataaaattccattaatggctgaaatacacgctaaatctacaaggtatgcaaaaaatcgaatccaaaaacccgcataaaaataatctggataatgatgaaattgcggcttacgctcttttttctgttcaagtaatcgtgttaccggcccgacagcaggtctttggtcagtttcttcaatcatttttactcacccccatagaggtacattgcctttggagcttgtggagtaccaacgctttcggcaatgtttctaactaattcttcttgtgatggtttaatcccctgcaactccgccagactattgccaagccaagtatccaagaaatttgttgatccgcttgtataaaaaacaaccttcgcatcgttcaacccattatctttccgcaaggctttcaacgcttgatctggataaccgatatcatctaccaagccattttcaagagcttgagctccatcgtaaattcttccatccgctaatttccgaacatctgcttcattcattttacgaccatctgctacaactttgacgaatcggccatacatactatccacaaaagcttgcaatacctctttgtcttcttttgtctgtggtcttgatccagaaccgatatcttttaaagcaccactcttaatcgtagcatcagcaatcccaagcttctccatcagaccagaataattcatactggacataatcactccaatagaaccagtcatagtatcttcagttgcaaatattcgatccgaatttgctgcaatatagtagccgccactagcagcttgactttccattgaagcataaatcggaattttcttctcattttgcaattccttcaatgcgcgagtaatttcggctgtctcgtaaactgaacctcctggtgagttgatctctaacaaaatccctttcactgaagaatcctttttaattgtagctaattgcttcataaaggattcatgattgtatcctccagttgaaaacaatccactagtgccatcatcaatgatcgtcccttccacaacaagtttgacaatctttttgctgctagatccagcttcttccactttttcttggggttcaccggttccatacagtagttcattaacttgactaagctcttttttactttcattttttcggctgattgttgtcgagattcctgagaaaatcagtaatactactgcaataccaaccgccacccaacgtcttttattcatctatcttcctccttgttcatttttaaagtgataattttccaagaaaaattagtttgattcgaatgtcaatatctttaactaaacgtctagataaattagctatttgattaactatcttatgttgaaatatgttgcaaaaaagtcgaactgacattcttaattttactcagaataaagctaccacattaatataaattacggataatcattactttttctgttggaccttctgctttcattttttcagctttttccactaaagaatatccgccaaaaaattcatgcgttaaaggatcttcaattttgaaggcttgggcttcctcaatgcttaacgcatctggattgatttcttgaatactatcccagccggtatctaagaaaatcttcgtttcatcgttaatctctggattatcaacaagttgcgctaaatatttacgtaactcgccgactgttagattttctggttggttcattctattttcctccttatatattttctgcgaaaagagtattcacagaaatatcttttttacaaacgaatagtcgctacaagtaacaaaaagatttgcgctaaaactattcgataaatgatacttctctattctaccttattcttcttacagatgaaacgtagaagattctttgttatccctctctttttttcactaatttcatatataccaattactaaaaaataaaaaaatgtttgactatactgaaagtttgtattatattattcattgtttccgagagtaaaacaaaaaaatcttaaatgtaccaataagatagcgccagacctcttctagaggtgacgaggaagaagctaatcgaatgattcggcgggtggcttcagggttgctgtgctctacagatcattacaaaaactttataaaagaacaaaaaaatgatcggacagctcgggaacatataatgacaggaaagtaggaagacattatgtgtggaatcgtaggaattgtaggaaatgatcaagcaacaagtattttagtgaatggtttagagaaattagaatatcgcgggtatgactcagcaggcatctttgtagcagatcaaaatgatgattttttagtaaagtctcaaggtcgaattaaggaactggccgacaaaattggtaaagacgtacacggcacaatcggaattggtcatacacgttgggctacccatggcgaaccaagtgaagaaaatgctcatccacatacttcacaaagtaaacgctttgtgttggttcataacggtgtaatcgaaaattatgatgagctaaaagaaaaatatttaacagatgacattttttatggtgaaacggacactgaaattgctgttcatttggtcgagtacttttcggaacaaggtctttcaacaaaagaagcatttcgtaatgcactaaaagagattcatggatcatatgctttcggtttaatcgacaaaaaagatcgtgaaacaatttatgttggcaaaaacaagagcccacttttgattggtttaggagatggtttcaatgtagtctgcagcgatgcgatggcaatgttagaacaaacgaatcaatttgttgaaatcaatgatggggaaatggtcatcgttataaaaaatcgtattgaaattgaagacgagtctggaaatgaaatccaacgtgctccctatgaagcaaaaattgatctttctgatatggaaaaaggtacctatccttactatatgttgaaagaaatcgatgaacagcctgcaacgatgcgtcggatcatcagtgagtacacagatgaaacaggaaccgtcgttatcgaaaatgagttgttgcaaagtttattaaacagtgatcgtatttatattgttgcttgtggtacaagtaataatgctggttgggcaagcaagcagattatcgaaggcttggccaatattccagttgaaatccatttatcaagtgaatttggttacaatatgcctttactttcagagaaaccgttctttatttacttgacacaaagtggtgaaactgcggacagtcgtcaagtgttagtaaaaactaatgaacttggatacccttcattaactgtgaccaacgttgccggatcaaccttatctagagaagcaagctacacaatgctactacatgcaggaccagaaattgctgttgcttcaactaaggcctataccgctcaaatagcagcattaaccgttttagcaaaggctgttggcgaagcaaaagaaattactgctgcaaaagaatttgatttaacaaaagaacttggaatcgcagcgaacgcaatggatgtgatgattgctgaaaaaacgatgatcgaggaaattgcagctgaatatttggcaacgactcgaaacgctttctacatcggacgttctgaagattactatgtttcaatggaagtcgcactaaaactaaaagaaatttcttatattcaagcagaaggcttcgcagctggtgaattgaagcacggtacgatagctttagtcgaagagggtacgccggttattggaatcattactgaggctgtaaccgctcctcacacgcgcggaaatctaagagaagtggaaagtcgtggagcccatactttagtaattgcatctgaagaattaagcaaagatggtgaccaaatcattttaccgaccgttcatcaatttttacgtccgcttgtctctgtaattccaggacaattaattgcctattatgcaactttattgcgtggatacgatgttgataaacctcgtaacttagctaagtctgtgactgttgaataaacaaactagagggagtgacaaaagtaatagtcactccctcttttacatgtaaaacgcccgaacttaagaaatcaggcgtttttgttctctaatctaatccaatttcttcacgaacaactgctgcgattttatcgacatagtagtcgaccttttcatctgtaggcgcttcagccataactcgcaataacggttctgttcctgaaggacgaactaagatgcgtccgtctccattcatttctgcttctgcttcttcaattgcttgtttgatggctggtacgtccatggcaccgtacttgtcgctgacacgaatgtttaccaatttttgaggatagattgttacctcgctagcaagttctgagagctttttaccggtttgtttcataatgtttaataattgaacccccgtcagcataccatcacctgttgtattgtagtctaagaacaatacatgacctgattgctcaccgccaagattataatcattcttacgcatttcttcaaccacataacggtccccgacctgtgtaatgacatcatccaaaccaatatcctcaatagccttatgaaaacctaaattactcataacggttgtgacaaccgtatctttttttagccgtttacgttcggctaaatatttcgcacagataaacataatgcgatccccatccacgatatttccaagctcatctaccgcaatcactcgatcgccatcaccatcaaaagccaaaccagcatctgcgcccttttcaacgaccattttcgctaaagcttctggatgagtggaaccaacacccgcattgatatttagtccgttcggagaagttcccattgtgtaaaaatcagtttctaaatcggcaaataagcgattaacacttgttgaagttgcaccattagctgcatctacacaaactgttaaccctgataaatcgcctgaaattgtctgcactaagaactgagaatattttaataacccttcatggaattcgtctaatgtccctaatccttcagcagatggacgcggcaatgtatcctcctcagcatcaatcaacgcttcgatctcagcctcttgttcatcaactaatttaaagccgtctccaccgaaaaatttaattccattatcttctgctggattgtgtgacgcagaaatcataacacctgcagaggctttttgtaatctcgttaagtaggccacccctggggttgagataacaccaagctggaaaacttcgataccaacagataataaccctgaaatcaaagctgtttctaatagttcgcctgagatacgagtatcacgtcctactaaaacacgtggacgtccttcactctcatgatgttgacttaaaacgtagccaccacaacggcccaacttaaatgctagctcaggtgttagctccttattcgcgattccgcgtactccatctgttccaaaatatttacccattaaattatatttcccttcttcatctagttagctgattgatttgtcgactcttcttgactgctagtcgcttgagtatcagtgctcatttccgaagatcttgaactgtcacttgagttccccgcggctcctgttgtcgacgaactagaatgatttgtactacttgtttctgagtcttgtgattttttaaatactggtgttacttgtgcacttactgttttcggaataacctgataatttccagagattgggacatcgataaatttttttaccgtcccttgaatttgacttacgtcaaccggaataccaatactgtctatttgatcaattactgactgcacgccagtaattgttgcctttgttcgattcagatcgattttgacactttcaaccgacgaaggcaaatctccttcttgaatcggataaagcgaaacttctttacttggtgtttgaatttcaaaattgacagttacattttgcggatctgattggatcggcaatacttcgccgctggcatttaaagcctgtacaggtgcttggatactttcctgatccgaagaaagtttactactatctactgaagcgacaacacgatcgatttctttcattgtggtttctccagttgtgatttcaaccttctctggttgagttgacagttctccgactttcaatccattattactggtcgtactgcttaaaattggagacacatcaaatttctttttgacctttttttcaatcgtaactgaaattgtttctggttcaatcgttgcaaaaagtgaactagataaatttttcgttttcaatctaacttcatgcgttccagatccaagcttagataaatcagcaactacactgaaattgcgagtatctggatcgatttctctattcaattgaatcctattagcaccgctcaatttgactgttacatttgatgaaaacccatgaacaaaataatcatcagaatcgtaaacaacattaatcggtacattctgtatagattcttcatagttcgtatcagatgaaattaatctgctgaaatttgaactatttacattaaaaaataagattaaactaaatagcagggagatcaacatataaggtacgttgtcttttttgaacttaattctcattttttgcctcctttagtcaaaccttccaaaaaggtttgcaagagactctttctccctacaattttctcatccggtagtaattctcgtcgcattacagccaagtattcttcttgggtcaagtcgtgcaggaagtcattgcttaacgtaatgcttacaccacctgtctcttctgagacgatgaaagtcagagcatcgctgacttcactaataccaactgccgctcgatgtctggttccgaattcttttggaattagcatactatccgaaagaggtaaataagcagaggcaactgcgatttttccatctttgacgataacagcgccatcgtgcagaggtgtattaggaataaaaatattgatcaataactcgccggtaatatccgcatctagatcaattccggtttcaatatactcgtctaagcctgttgaacgttgaattgtgactagagccccgatttttcgttttgacatgtattgaatggctttatcgaaggccaaaatcatccgttcatcatccagctcttctttcttcgatgttttaaagaaagcactgcgtcctagatgctctaaaccacgtcgaacttccggctgaaagataataattgccgcaatcacgccataagtgatgacctgattcatcagccacgataacgtatgcagaccaattaactcggcaacaatccggataccgataaagattgcgacacctttaagcaattgaacagcctttgttccgcgaacaagttcaaacaaacgataaatcagaaaccaaacaacaaatatatctaaaaggttgacgataatatcccaggttgaaagattctcagaaaaaaagctaagccaataatctggtttgaataattcaattaaacgattaggcatgaataacctctctttctatccaaaattctctacaattataccacaatggtacagctctagcataaaatttaagagagagccttagcaagctaagactctcaaatataactattttttacgtttctcagctcgtgctgctcggcgtgcagcgcgtctagcttctgcttctggatcaactttacgctcacgttttagtttaacattgactgcttcatcagtattttccaacttagttccagctaatttcgcacgaatcttttcttcttgtccggctaaccgggcgtaattatagaaacgagtctgtgcatcatttactgtcttttggtatagacgctgtgcatcttcaggttgaattctttccaacgcagaaaaacgtgtttgttgtttcatgaatccgatcatttcatcaaaatttggtttcttatagtccaatgtcatcggatttttacctttttcacgttgtaaaggattgtaacgatacagtgaccaatagcctgaattaacagcatcttttgcttcttgcagcgttttgctcattccaccgcgtaacccgtgattaatacatggcgtataagcaattacaagcgaaggtccagggaatttttctgcttcttctagagctttgatggtttgcatttggtttgctccagaggcaatttgagccacatagacattgccataggtcatcgccatcatacctaagtcttttttagactgatattttccacccgcagaaaatttcgcaatagcagaagctggggtcgctttagacgtttgaccgcctgtattagaataaacttcattatccattaccaaaatatttacgtcagcaccgctggctaaaatatgatctatcccgccaaagccgatatcataagcccagccatcaccaccaaacatccactgactggttttcacaaacaaatcacgattatcataaatatcagcaagctttggatcagataaatccgccacttctaaggccgccgctagttttgtggctctttgttgcgtcccttctgattcaaacatatgatccatccagtcttccaacaactctcgtaaatcatctgaaacgtaatctagtacatcattgattttatcagctagctctttacgacgtgtttggtttgctaaaaacataccgtagccatactccgcattatcttcaaacaacgaattcgaccaagcgggtccttgtcctttttcattcgttgtatatggactgactggagccgccgcaccccaaatagatgaacaaccagttgcattagcaatcatcatacgatcaccaaacatttgtgtcattaatttgacataaggtgtttctccacagccagcacaagcgcctgagaattcaagcaatggttgattaaattgagagcctaaaacagaatttgtttttgcaggatttgccttttgctttaaagtcattgagaatgcccagttgattgcttgttctttttcctcttcgtaaggcttcatgaccaaagctttacctttcgccggacaagcctccacacacaagccgcaacctgtacaatcttcaacggaaacctgaatacggtatttctgtccatcagcaccacgcatctctcttacaatgtatccttcaggtgctgcctccatttcttcctcatcggctaagaatggtcgaattgcagcgtgaggacaaacaaatgaacattcattacacatcgtgcagcggtcactaatccagtgcggaacttctaaagctacaccacgtttctcaaacttcgctgtacctgttggtatagttccatctgtcatcccatttataactaaatcattcactgtcaagctatttccttgttgtgaatttatcggttcgacgatttgttccacatattgagtaaccggtgtttgccggattttttttggaatctctactttagcccaagtttcaggtacttgaacttgatgtaaaagttcaactgtttgattaatcgcagctatatttttttcgacgatctctaatgatttccgtcgatagctcttatctgcttccgcttttaaaatatctaatacttcctcaaaaggaatgatcccagttaaacggaaaaacgccgtttgcataactgtattgattcgtgaacctaaaccaacatccattgctaatttcgcggcattgatggtataaaatttaatatcattttctgcaatataacgcttcatcttagctggcagtaatcgatcaatctgcgcatcattccacatagtattcattaagaagactccgcctggcttcagaccttttaatagatcataagtgtgaatataagctggtgtatgacaagcgataaaatctgcactctcaacaagatacgtcgaacggatcggcgtatcaccaaatcgtaaatgagaaacagttaatccgcccgatttttttgaatcataactgaaatatccctgtgcgtatttatctgtatggtccccaataatcttaatagccgacttattcgcaccaacggttccatctgacccaaatccccagaattttgcttgaaatgttttaggatttgtcaggtcaagaataccctttgtttctaatgacatatttgttacatcatcaacgattccaatcgtaaaacgtttttttgcttcttttttattcttggtcaattcatcgtaaacagcaataatttgatctggagtcacatccttagagcctaaaccaaaacgaccgccaatgattttaggacgaacatccgcttcatacattactccttgaacgtctaataaaagtggttccccatctgcccccggctcttttgaacgatccaatacagcaattgatttaacagtatccggcagtttgtccaaaaaattttcagtcgggaacggacgatacaaatgaatgtttagaaatccaaccttacgtccgtttgcatttaaatagtccaccgtctgctcaatagtttgggctacggaacccatcgctacaataacctcttcagcatcttcagcaccataataggttactaagtcgtagtttgttccacgtaatttattaatttcaaacatatatttttggacaattgctggcagttcatcataatagcgattgactgtttccctttgttgaaaatgtacatctggattttgattggttccgctgatggtaggatgattgggattcatactacgtttacggaaagctcttaatttttcttggttaattaacggcgccagctcctgataatcaagcacctcgaccttttgaatctcatggctcgtccggaaaccatcgaaaaaattcatgaaaggcaaactaccttcaatcgcggccaaatgtgcgacagcagataaatccattacttcttgcacactactttcttgcagcatagcgaagcctgtttgacgagctgccattacatctccgtgatcaccaaaaatattcaatgcatttgtcgtaacggcacgactagcaacatgaaaaacgcctggtaacaattcaccggcgatcttatacatgttaggaatcatcaagagcaatccctgagaggcagtataagtcgtagttaatgcgccggttttcagcgcaccatgtacgacaccagcggcaccggcctctgattgcatttccgtaattgatacgggttgaccaaatatatttttctttccttgtgaagcccactggtctacaagttcggccattgttgagctaggagtgatcgggtaaattgcggctaattctgtaaatgcgtatgaaatataagcagcagctgtatttccatccatcgtttttttcttacgcatgtgtctcctcctttttcaattaattgttgtcatttctaatgtagaaaaacaacctatatttctgtaatatctctacaagatacttggattcttgagataccaattttagaatttttataacaacggatttattataaactaacataccttaatttcaatatgtcttgtaggctttttaacttaatttatatgaaaagagtttgtattcttataaatattctgtacactaatagatgaaaggatgtgttttcgtatggatatttcagttattaaaggaaagctagtcaatgattttaatgggattaaaattggatctgatacagcaccaaaacgcttgattgaatttatcaacctccgttgcccttactgtaaacagtggttcgaagaatcttatgacacgttaaatcaagctgtcacagaagggaaaattcaacgcgtcatcaaattactagacaaggataaaattagtttacaacgcggcaatgttatgcatgaatacattgatactgaccctgaaaaggcattaacacaaattcaacaggcgttcgaaacccaaacaatttggcaagatttcgaactcgaagctgtcgctgagtacgccgaaaaaacactgcgtttcaaccagcaagcaaaccaaatattgcaaagcgagatacgcaacgaagccgaacaagccaatatcaaatttgtaccaacaattgttttaggcgaacatatttttgacgaatctattgatgaagccacattaaaatcatatattgctgaatagataaaaaaaccgtttggaattgaactgacctccgaatgttagatcaaaaatctaacatttggaggtcgcttcacttcaaaatcaaacggtttttttgcgtaaattatctgcaaagtcattgatcttacgaattcgatgattgattcccgatttggagattgcacctgatggaatcatttctcctaattcttttaaactaatttctggattttgtattcttaattctgcgatttcctgcaacttctcaggtaaagactgcaaaccgacagtagcttcaataaaatgaatgttttcaatctgctttgaagcagcatcaattgtcttattcatattcgctgtctcgcaattaaccaaacgattaaccgaattgcgcatgtcacgtacgattcgaacatcttcaaattttaacatcgagttcgtcgcgccaatcaacgttaaaaagtcggcaattttctcggccccttttagatacgtgatgtacccatttctgcgctccagggtacgtgcatttaagtcgaactggttgagtaaatcacaaatatcttgattatgctcctcatagatcgacgaaatctctaaatgatagcgactagtttctggattattaactgaaccagaagccaaaaaagcccctcttaaatatgcgcgagtttttttctctgattgtttgatctcattagaaatatgcgattgaaacatcgcaccgtccatgatatccaaatctagtaatattttctgagtttcctgtttcagccgtacaatataaacattatttttcttcaatttcattttacgccgtaccagcaattcgctgcgaacaccgtaatgctctttcaacagcgtaaaaattcgacgagcaattgcggcattttccgtttgaacgttcaaaacaaattgatgattgttcaaactaagcgaaccgttcattcgtatcaaagcagctaattcagcttgcgcgagattcttttggaccgccagacccgttaattccttttttacctctgctgcaaaagacatggcgagccctccttatttctacttaatattaaatttttgccccaaaaacaattcggaacaattcatcaaccaccttatcaccatcgtggaatacaccgccatcacgtaatttcaagaaatcagtggaaacaactcgacaaccttgttctcgtaagccgttgaaatcgtgagtcacttgcactaaatattcatcatagatttcaggatccatgtatccctctggtacgtgctcggtattaactaagaccgtatcaataaaattacttttaagatgcttatgtaaaacacgaatatgatctgcatcactgaaatgctcggtttcacctttttgagtcatgatattacaaatatagacaacttccgcgtttgtcgtgcgaacggcttcgcctaattcttcgatcatcagattaggtaaaatgctcgtaaataacgaccctggacctagtacgaccatatctgcttcattgatcgcattaacaactttacgagccgcgtggacagccttttctccgcttttatcagtaacgtaaaccttttcgatatttttgcgatcaatagcaattttggactctcctactgcactggttccatcatcaaaatcagcgtgcaacactaacggcatctctgacgatggataaatatgtccatcaacatgcatcatcatagaaagtaattgaatcgcttcataagtactattgcgcatttcagacaatgcagcaatcaacagattgccaatcgtatgatttgctaaaaacttatcactttcatgaaaacgatactgaaataaatcttcatagagttttggcatatcagataacgctgctaatacatttcgcaagtccccgggtggtgccatgtcaattgaatcacgtaattcaccgctgcttccaccatcgtcggcaacagtgacgacagcagtgatatccgcactttggttgcgcaagcttttcaaaatgaccggcagaccagttccgccgcctattacgacaatcttaggtttgcggatacgatatgttttcattttcatgaacgattcaccgtctctttccgcttatccttatcacgatgcgtaatattgactttataatctgcatctttaatcgccttgcctacccgttcagtcaatgcaaccgaacgatgttgaccacctgtgcagccgatcgcaattgttaaagagctttttccttctttgatgtagcctggcagaatatccatgatcattcgtacaaaattcgtataaaagctttctgtttcaggaaatgacataacataatcgtaaacaggcttatctaatcccgtttgcggtcgtaattctgggatatagtgtggatttggtaagaagcgaacatccatcacgatatccgcatcaatcggcaaaccatacttgaaaccaaatgaaacaacctccacatggaagcctaaatcatcctgctgtttaaatgattgattaattttttcgcgcaattgacgcggagttaaatcagtcgtgtcaatcattaatgttgcacgattttttaaatcttccaaaattgcccgttccttgcggattccctcggtgatcatgccctccattgcaaggggatgtgcacggcgagtctctttgtaacgagaaactaactcctcatcagagcaatctaaaaatagaatactcgtatcaataaaacctgtattttcaatttctaccaacatattttgaatatcttcgaaaaatgaccgtgaacgcaaatcaaccactagggcgatttttgttacctttcctgattcacggattaattcccagaatttcggaattaaacctggaggcatgttatccacgcaaaaataccccatatcttcaaagctttgaatcgccacggttttccccgcaccactcataccagtaatgacaactaaatgtaaactctcagtcatttgtgtctctcctctcttttttaaggaaattatttcaaaataatctatcagactatctaagtgactaaatcttcatatgaatactctttttatatgtgcgctaaaaaaaggcaaaaactcctttgccttctaaaaaaattataacattcctggcgtgtctttgctacttttttataattctttaaattttcgtaataacacgaccaaaaaaacaaaccttcctacttggaagatctgttttttagcgctagttcaattgtccgatctgctaaaattgattgggcatcgatcacagaatatggtacatctttcgtcaattcttggactaaagacagctctgtacagcctaaaatagcgttttgacatccatgcttttcaaaaacgtctgaaagaatttctaaatacagctcactatttataaagtcattttccttcacatcatgataaatcagatgattgaccttgtcttgcaactctttttcagggaccagaacttcatatccctttatttccagttcgctttgataaactttagcggacatagttccagcagtagccagaacagcaattttatcccctttttgatgattcttcgttacttcattaacagcttctcgcggcatatgcaatagggggatcttcgttgcaccttgcaattgctcgaaaaaataatgagccgtgttacaagtcaagacgataaaatctggctttaataagttttgtttctcgatatcatctagcagaaaaggtaggggattcgctgccttattatctaaaatgtaagcagttcgatcgggaactgtcgcatgattgaacatgacgtagtttagatattcttgatcgttatgagcctgagtccgttgattaagaattcgaatgaaactctccgttgccatcgtccccataccgccaagtatactaaagaaattttccatgtttatccttctttctctttaaagaataaatcaaaacggcctttatattggctaaacatatatttcattaatacccatcgcatcaaggacatatctttcttgtaaaagacagttgtcccccattgatcctttttaatcatttctagggctctatctttatctacattgttacgagcatatttttcaaaaacactcttaggaacacccatccataattttgaattagctggttcagctttgccgtaaattgtttcatcaaaaggtttctcaaaaacacgatcctctgttacatattgggctaagttgaagccgtttaatgtcacaaagaaactgctacgcccttgacgtaagttgatttcgaataacttatactcaccatctcgcggatcatatttcatatcgaagttagcaaagccagtataatcgattttttctaaaaagctcttgatggtttgatagattttttcattgtattcaggcatgatggctacataatttccgattgcttcaggagaaggatcttctagcaatggatgccccaaacacatcatgcgaacttgatgattttgatccacgtaagcgtttagtacgcgcatattgctatcgtcacctgggatgaaatcttgggcaatcatctcacttgtatagccggcttgataaattcgttcaatgatcgtatcgaattcgtcacgtgtatctaggataaaggcctttttgcgtccttcaaaatcaattgataaccactcgacactattagcaggtttcaaggctactggaaagtcaaagggcaaatcttgtttcaattttcccgcttcaagcatatcctctgtaataatgaaggtttttgggtaaggtaaatcatacttttcacagatttcataaaagctgactttactgatcaaacgttgcaacaagtcaaaatcaatataagggcaaataaaccattcagaaagctcttccttgtgttgtgaaaccaactccgcatacccatctccgcaggcaatcagcaaatattttgtttcggggttattataggtagtctttcctaattcgcgcattttatccatgaacacaggatctttatcgaatcctggtacaacatggacattcacgattttactgtattttgtcggcgccaactgtaaaccagcataagcttcagaaacgattccatatgcttcatggaaagaacgagacattccatatacattgatgtcgcttcctaacaggatcggtacaaatttttgtttttcattcatattctcttacaccttctcattctaaatcaacgataatcataccataaagaaaaatgcaagcaaaggagaatcctttacctgcattaagctttatcagttacttattttttaagaacgcgttttaaataatgtccggtgtaactctccggtacttcagcaatttcttcaggtgtacctgtcgctaaaacagtaccgccgccatcgccgccttctggtcccaaatcaatcacatagtcagctgacttaatcacatctaaattatgttcaattaccagaactgtgttaccagcgtcaacgaagcgttcaagcaccttcaataaacgtgcaatgtcatctgtatgcaacccagtagttggttcatccaggatataaaaattcttaccattcgaattcttgtgcagttcgctggcaagcttcatccgttgcgcttcaccaccagatagcgtcgttgctggttgccccatagtaacataacctaaaccaacatcaacaatcgtttgcaattttcgatgaattttaggtatatgcttgaagaactctacggcatcttcgacagtcatttctaaaatatccgcaatattcttacctttgtagtgaacttccaacgtttctgagttgtagcgtttgccatgacaaacttcacacggaacatacacatctggtaagaaatgcatttcaattttgatgattccatctccgcgacaagcctcacagcggccacccttaacgttaaaactgaatcgtccttttttatagccacgaatttttgcttcatttgtttgagcaaataaatcacgaatgtcatcaaacacactcgtataggttgccggattgcttcgtggtgtccgtccaattggactttgatcaatatcaactaatttttcaatattattgtaaccagtgatcttcttgaatttgcctggtttattggaattacggttaagcttttgcgctagagctttcttcaatatttgattaaccagagttgactttcctgagccagaaacacctgtaaccgcgacaaacttacctaatgggaactctgcatcaatattttttaaattattctcagcagcaccggtgattttgatcttcttgccatttcctttccggcgttccttaggtacagcaatttctcgtttaccagataaatattgaccagttaacgatttaggattcttttcaacttcttttggtgtcccagcagccacgatttctccgccctgatcacctgctcctggacctacatcaatcagataatccgcagcgcgcattgtgtcttcatcatgttcaacaacgatcaacgtatttccaagatcgcgcattttctttaaagattcgatcaaacggtcattatctcgttgatgcaaaccaattgatggctcatctaaaatataaagcacaccagataaatttgaaccaatctgagttgctaatcgaattcgttgcgcttctcctccagataatgttccagatgcacggcttaaggtcagataatccagaccgacatttcgcaaaaagcttagccgatccttaatttctttcaaaatgggtttagcaataactttttcttgttcgctcaaagcaattgtttcgaaaaagtctagtgcgctattaattgaatcttcactcacctgtcctatattcgtatcattgatctgaactgacaaggcttgaggattcaaacgatacccatgacaagtttgacaggtcaactcagtcatatacaaacgcatttgatctcgagtgaaatcactatttgtttcagcgtatcgacgattaatattgttgataattccttcaaatggcacctctacgtcacgaacaccgccaaaatcattttcataatggaaatggaagttctccccgttagaaccatttaaaataatatcctgatgttccttcggtaaatcttcaaaaggtgtatccatgtcaatgccaaagctcaagcaggcctgttccaacatttgtggatagtattgcgaactgattggattccaaggaatcaaggcgccttgacgtaatgtcttactttgatcgggaatcactagatccatatcgacttctagtttcacccctaaaccatcacaatctggacaagcgccaaatggtgcgttgaatgaaaacagacgaggttcaagctcgccaacagtaaatccacaataaggacaagcataatgttcactgaatagcatttctttttcaccgatcacatcaacaatcgcataaccctctgctaaacgcaaagctgcttcaaaagaatcaaataagcgcgatcgaatgccatcttttacaacgatccggtcaacgataatttcgatatcatgctttttatttttggttagttcaggagcttcggttacatcatacaattcaccatcaacacgcatgcggacgtaaccttcccgttgaatcatttcaaaaacttttttatgctgcccttttttcttagcaactacaggagctagaatttgaattttcgtccgttcgggtaattccaaaactttatcgaccatttgctccactgactgtgaagtgatttcaatatgatcattaggacaaattggatggcctacgcgggcataaagcaatcgtaaataatcattgatttcagttacagttcccacagtcgatcgaggattcttgcttgttgtcttttggtcgatagaaatcgctgggcttaagccatcaatactatcaacatccggcttatccatttgacctaagaattgacgggcgtatgcagatagactctccacataacgacgttggccttccgcatacaacgtatcaaaggccaatgaactctttccagaaccagataaaccagtaacaaccaccattttatcacgaggaatcgtgacatctacatttttcaaattatgagcgcgcgctccgtgaataactatcttatcatttgccatttatatctcctatttcattgatttactgtaatttttttatgcttagctgccttattaattttatttcactaagattagcaaggcagcaaagcggaatcatactcttactaattagatttgtctattctgctgcttttagctctagaatcgtatctcgtaaggttgcagcagtctcaaaatcaagtgtcttagcagcttcacgcatttcgtcttccattttagcgataagttcttttcgttcggatttagaaagctcgtcaaatgaagtggcgtcatatgactcagtatcatctgcgactttactgatcgagatcaaatcacgaatttctttaatgattgtcttcggcacgattccgtgttcttcattatactgttcttgaatactgcgacgtcgtgacgtttcatccattgctcgttgcatcgaatccgtcactttatcagcatacataataactttaccttctgagttacgggctgctcgaccaatcgtttgaacgagcgatcgttcacttcgcaggaatccttccttgtcagcgtctaagattgcaaccaacgaaacttccggcacatccaacccttcacgcagtaagttaattcccacaagtacatcaaacttccctaaacgcagatctcgaatgatctcagtccgttccagtgttttaatatcactgtgaagatacttgactttgattcctagctctttgaaatagtctgtcaaatcttcggacatttttttcgttaaggtcgtaacaaaaacacgctcatttcgttcagaacgctcattaatttcaccaacaagatcatcgatttgccccataatcgggcgcacttcaatgaccggatccaataacccggttggacgaataatttgttctaccacagtatctgtttcttcatgttcataaggtcctggtgtcgctgaaacataaacaatctgattgacccgttcttcaaattcttccagacgtaaaggacgattgtctaatgctgatggtaagcggaatccataatctacaagcatttgcttccgcgcacggtcaccattatacattccgcgaacttgaggcatcgtcacatgtgactcatcgactacaagtaagaaatcttcagggaagaagtctattaaggtataaggcggttccccttctttacgaccatccatatgtctagaatagttttcgattcctgatgtatagcccatttctcgcagcatttcgatatcgtaattcgttcgttgttctaggcgctgtgcttctagtaatttattatcattgcgtaatacttctaagcgatcttctaattctttttgaatattgctgatggctacttccatatgcccttcattcgttaagaagtgagttgcaggaaatattgcgacatgctccgtttctcccgtaatttctccagttagagcatcaacttcacggatacgttcgatctcatcaccaaaaaattccacacgtaaagcacgctcgtcacgtgatgcggggaatatttctactacatcaccacgaacgcgaaagcgtccacgttgaaaatcaatatcgtttcgctcaaattgaatatcgattaaatttcgcaacagttgatttcgatccatttccattcccacccgcaatgaaactacttgttctaaatattccttcggcgaacccaaaccaaagatacaagaaaccgacgccactacaatcacatcatttcgttccagcaaagcgctagttgccgagtgacgcagcttatcgatttcgtcattgatactcgaatccttttcaatataagtatcacttgatggtacatatgcctccggctgatagtaatcataatagctgacaaaatactccaccgcgttgttaggaaagaattccttaaactcaccatataattgtcccgccaatgtcttgttatgggcaataatcaaggttggtttattgacttctttaatgacattagaaattgtgtatgttttcccagtaccggtagctcctaaaagtatttgtgctttttttccatcgacgattccttcggctaactgtgtaatggcctcgggctgatcgccagcaggctgatattttgaatgaagatcgaacgtgttgtccgttactctttcaatcatacaaaaatcccccttttctattaaataaacaaagattttccatttcaaaattatagcataccgaacatattttcgccattttttattcttgccataaaaagttcttaacaatcgatatgttaccttttcttacatttcatgttataaaaattttgctttttttctttccaccaatgaaccctcttgtattttatccttaaactaacatataataaacaaatgataagtatataggaggattattatgagaaaaaacaaattaattccattcgtcgtttttttgatggcaagtatttttacacttggctttgccaataagaccgacgccgcggaaaagacatataaaatcggaacggacttaacatttgcgcctttcgaatttcaaaactccgatggcgaatacataggaatcgatgttgatttaatcaaccaaatcgccaaagatcaaaatttcaaagtggacttacgccccttaggttttgacagttcaatccaaggagttcagtcagatcagcttgacggtatgattgctggaatgagtattacagatgaacggaaaaaaacttttgacttttcagaaccatactttgacagcggtatccagatggctgtcaaaaacgacaacaatgatatcaaggactacaaggatttaaagggtaaaaccgtttctgcaaaaatcggtacagaaagtgcgactttcttagagcagaataaagacaaatatggttatgaaattaaactatatgaagcggctgacgcaatgtacaacgccttaaccaatggaaattccgttgcgatcttcgatgactatcccgttttaggttatgctgtaactaatggacagcccttcaaattggtaggagagccagaaaaaggcagttcttatggttttgctgttaagaaaggtgaaaacaaagaattattaaagaaatttaatcagggattgaaggatttaaagaaagacggcagctatgataaaatcgttgcaaaatatatttcaactggttctggtgatcaagccgcagcttcagatgaaatgaagaaaattgaaccgaaaaaagatgtttacgtggttgctagcgattctgcttttgcaccatttgagtacaaagatagtgatggaaaatacaaaggaatcgatgtcgatttgctaaaacgagcagctgaactgcaaggttttaaattagatatgaagtttatcggcttctcttctgctatgcaggctcttgaatcggggcaagctgatggcatgattgctgggatgactattacagatgaacgtaaggccaactatgatttctccgatccttacttccaaagtgggattcaattagccgttgcaaaagacaataaagatatcaaatcttacaaagatttaaaagataaaacagttggggccaaagttggtactgaaagtgctgattttctggaagcacacaagaaagaatatgggtataacgtcaagagcttcgatgctgccgatcaattatatgatgcattgaaggttggatcaattgatgccatgatggatgactaccctgttatcggttatgccgtaaatcaagggcaaaacttgaaaacaccgatcaaacgtgaaattggcggggagtatggttttgcagttaaaaaagggcaaaatgctgagcttcgtgaaatgttcaccgaagctttaaaagagatgaaacgaactggcgaatacgatgagatcgtgaataaatacattggtactgaaaaggaagagaaaaaagatgctgtggatgaatcaacgatcaccggcttattaaaaaacaactataaatcattgttggatggtttatggaagacgatcgttttagctttagtctcatttgctctcgcattggtattaggagtaatcttcggactgttccgtgtctcacctgttcgaggtctacgcacttttgcaggtatttatatcgacattattcgtggtattccaatgatggtattagccttctttattttcttcggcttacctgggattacaggcatcaaaattcctgatttcgcagctgggattattactttaaccttgaacgcaagtgcatacatcgctgaaattgttcgtggtggtatcaatgctgttccagttgggcaaatggaggcttcgcgcagcttaggtctatcgtacaatcgcaccatgcagaaaattattttaccgcaggctgtgaaaattatgatcccttctttcatcaatcaatttgttatcagtttgaaggatacaacgatcatttccgcaattggtgtggtagaattactgcaaactggtaagatcattgtagctcgaaccacacaaagttcttacgtttacttgatcattgcgattatgtacttgatcttgatcacgatcttgactaagttagcgaaccgtttagaaaagaaggtgaaatagatggaaaaaatgatggataataaaatcgtcgtcaatcatttagttaaaaaattcggagacaatactgttttaaatgacttaaatatcactatcagtgaaggtgaagtggtctgcatcatcggaccatctggttctgggaaaagtacgttcttacgttgtatgaaccacttagaagaacctacttcaggtgagatcattattgatggacaggatctgacagataaacatacagatatcaatttggtgcgtcagcacattggaatggttttccaacatttcaatttgttccctcacctgactgtattagaaaacatcacattagcccctcttgatttaaagggggaatcaaaagagtctgctgacaaacgtggcgttgaactactaacacaagttgggcttgcagaaaagaaaaatgactatccagacagtttatcaggtggtcaaaagcagcgtgtggcgattgcgcgtgcgttagccatgaatcctgatattatgttgtttgacgaacctacttcggcgcttgacccagaaatggttggggacgtactaaaggttatgaaggatttggccttacaagggatgaccatggtgatcgttacccacgaaatgggctttgctaaagaagtagcggaccgtgtaatctttacagatggcggaaaaatattagaagatggcacgccagaacaggtcttcaataatcctcacaatccaagaacacaagatttcttaaataaagtgttgaatatttaacaaaaacccgtgaaatcattttagatttcatgggtttttctaaatgtcagcagatttttataaacattagtttttgtagctggcgagtgactgcgaaggattccatcttctggtgaaaaagcaagctcagtgactttctttaactcttcagctgctggaaaaattgatagctcctcataaaagttcggcagtgctaatttttcaaatagcgtttgatagcgtgcaagctcttcttctcgtccctcaattcgtaattgctgcaaagtggtcaacgcgatgatttgaccgtgacttccctttatctcgtttccccacagactgaccatcgcattatgcagtgcatgagcgatacttaatccgccagattcaaaaccgattccacttaataatgtattcgcttcaactacagcttcgaaggccggtgtaattatatgtttttcatttgcctccactgcctcctcagcaaattcaagcaacacctcgcgacatttttccgcaattgcttcagctgccaatgtcggcgcagcacctaaagtattcacaccactattttctcgtactgttcttgcttcaattgaagtcgataacccatctgcgattcccgccgtcaaaaaatgaaccggactattgattaaaattgctgtatcaattaaaacaagatcaggacttttagcataataggaatatttctcgaaataaccgttatggtatttcaccgagatacgtgatgttggcgcgtcggttgctgccgatgtaggaacaacgatacaggacgcatttgattcaaaagccaacgcctttcctaaatcaatcgcccgaccaccgcctaaagcaacaatataatcgaacgtttcacttggtctatcttcttctattacccatacaaacatttctccgcctagcttcgttagtttctggtacaatcgttctcccagcatttgataaacaaaaccatcagttacaattaaacctttttgaccaaaagctagaatatcttctaagtgattccacagaacattttctccctgacgataagtcataggactaacaaacactttttccataggctctcctttttatcccgtttaaaaatatcatagcaatcaaataaaataggcgcaaggcgagttttaaagaacacaaaaaacacgcaacgactagcgttgcgtgttaatcaattctatttatgcttcgatttcagttacgatacctgaaccaacggtacgtccgccctcacgaatagagaaagtcgttcctttttctaccgcaattgggtgaatcaattcaacgtcgattgtaacgttatccccaggcataaccatttcagttccttctggcaatgcgatgtttccggtaacgtcagttgtacggaaatagaattgaggacgatagttgttgaagaatggtgtatgacgtccaccttcttctttcgtcaatacgtaaacttctgcactgaattttgtatgtggtgtgattgaacctggtttagctaagacttgaccacgttcgatttcatcacgtgtaatcccacgtaatagaaccccaacgttatcgccagcttcaccataatctaaagttttacggaacatttcaagtccagttacgactgctttttgaatttcaggtttgatcccgatgatttcaacttcatcgccgactttaacttcaccacgatcaatccgtccagacgctacagtcccacgaccagtgatagaaaatacatcttcgactggtaacaagaatggcttgtcagtgtcacgttctggagttgggatatattcgtcaactgtatccattaaatcaaggattacttgttcttgttcaggatcgccttctaatgctttcaaagctgaacctttgagaactggaatatcgtcacctgggaaaccatattcagaaagtaattcacggacttccatttcaactagatcgatcaattcttcatcatcgactaaatcaactttgtttaaaaatacgattaagtgtttaacacccacttgccgtgatagcaaaatatgttcacgtgtttgcggcattggaccatcagtagctgatactactaggattgcaccatccatttgagccgcaccggtgatcatgtttttcacatagtccgcgtgtcctggagcatcaatatgagcatagtggcgtttttcagtttcatattcaacgtgtgcagtgttgatagtgattccacgttcacgttcttcgggtgcagcatcgatactagcatagtcttgagggtttgctagacctttcttacctaataccgttgtgattgctgccgttaaagttgttttcccatggtcgacgtgaccaatggtaccaatattaacgtgtggtttacttctatcgtaatgttcttttgccataataaacaaacctcctaataagtgtaaaaattcttacggatatagtgtaaaacattttgagttaaatgaaaaagatttacacttttttactttttgtaagtaactatccgaaatcataatacatcagaattggtcaaactccaaatgatatgttttgctttttatcaaaaaaagaaaattactagaaaaaactctgaaaacgcaagaaactcaatctcacctacttttcaggaaattagtaagttataataggctcaataagtgtacagaagtaaaaaagactggtttaatagaattggcttttttgatgataggactttgaagagaaataatgaatggaggatattcatggaaaattttcaagaaaaactagctcagcttccaactgaaataaaaagagcttggagtgttggctttgtttttattaaggaaaatgatcactactggcattttccagcaagacaatggagcgaacaacagattcaagactattttttagatcgttttggaaaaacaagtacctttaaactttatcctaaactaaagctaaaacatttaatcgtgaagaatatgcctgcacttttggtagtcgttccttatgaacctagaaaggaaagtatttgatatggttttattaaaactggatgctgtcagttatcaaagtgatcagcgaatcattttagatcagatttctttgatagtagaacaaggagctttcttaacaatttcgggtccttcaggaggaggaaaaagtacattacttcgattgattgcttcgttgctaactccaaccagtggcgaaattctttttcagggaaagtctcagcaacaatacgactataccgaataccgtcaacaggtctcctattgttttcagcaaccttcattatttggtgaaactgtactggacaatttaactctgccttatactattaggaaccttactcctgatcaaagcaaaatgatggaacatttagaaatggtcgatctgccaaaggaatatctgactaaaaatatttctgagctatctggtggtgaacgtcaacgagtagcactgatccgcaacattttatttttgccgcagattttgttattggatgaggtaacgacaggtttggatgaacaaacaaagagaatcattcatcgcttaatcaaaaacattcaacaaaagggctgtacgatcttacaggtgacgcatgatgaagcagagatccaagaagcagaaaaattactacttatccaaggagggaaacttaaacaatgaatcaattagctgtcaatgatctttctttagtcttagcttttgcattagtactaatcgctgttgtcattagttccaaagaaaaattgaatttatcgaaagacatctttcttagtattatccgagctatcatccaattagttattgttggttatttattaaaatatatttttcaagttaacaatgatcttttgacaatcgcaatgagtttattcattgtattcaatgctgcttggaatgcccataagagaaatcccagtcttcataaaaaatatcttcattcattagcagcaatttttattagcacttatactactcttggcgtattgattttcgctggagctattaaatttattccttctcaaatcgttcctatcactggaatgatcgccagcaactcaatggtagcaatcggtctatgctatcgggcgttgaatactcaatttcacgacttaagacaacaggtgttagaaaaattggcgctgggagcttcaatcaagttggcttctaaaccgatcctacagcaaagtatcaaaaccgccatgcagcctaccattgattctgctaaaacagtaggtctcgttagtttgccaggcatgatgtcaggattgattttcgctggactagatccagtccacgcaatcaaatatcaaattatggtcacctttatgctgctttcggctacaagtttaggctctataataggcggttatactgcctataaaaattattttaattctaatcatcaattgatcatataaaaaaaggaactccgaaaattatctctttcgggttccttttttaatcaaaccaataaattataaagggtcttatgttgacttaattcgatataggtcgaatcaaattcttttaaccgcttcaataaatctggcaaggtttcaggcttcttcaacaacacaccaattaccactggtccagtgccacgattacttttcttcgtatattcgaaacgtgtaatatcatcgccctcccctaagacctctgatacaaattccttcaatgctcctggacgttgtggaaaattcacgacaaagtaatgcttcaagccttcataaatcaacgaacgctcttcgatctcagccattcggttaatatcgttgtttccaccactgataacacagatcactgttttccctttaatctggtctttcatcaaatctaaagcagctacactcatagcgcccgctggttcaactactatggcttgtttaccatacaaatctaagatagttgaacagattaagccttcatcaactgacatcagttcgtcaacatattccctactatgagaatatgtgatttcaccgacacgttgaactgctgctccatcgacgaatttatcgatctcggttagtttaactggctgctcttcctcaaaggctgcctgcatcgaagccgctcctttaggttcaacgcctatcactttggttgttggtgaggtgttcttcacataagacgccacaccactgattaagccgcctccaccaattgctgtgatcacgaaatcaggtttataaccttcgctttctgcatcagtcatcatttccaaagccagcgttccttgaccggcaataatatttttatcattaaaaggatcgataaaggtcatgccgttttcttcgcagtatttttttgcggcagcagcagaagcgtcaaaggtatcgccgactaaatgaatatccgcaaattcaccaccaaaaaatcttacttgcgaaactttttgttgcggtgtggtggtaggcataaaaattgctgcccgcgtctttaattcatgacacgtgtaagcaactccctgcgcgtgatttcccgcactcgcacaaaccacacctttcttcaaatccgcctctggaagtttcttaatggcataataagcaccgcgtaatttaaatgaacgaactttttgcaggtcctctcgctttaataaaacagtcgcttgatatttttcagataaataacgatcatattgtaacggcgtgtggttgacagagtccttcaataattgataggcactgcgaacctcagtatctttgatcaattccatcgctgcatcccccattaatctttacgacttacaaatggcatcattttccgtaactcgccgcccactttttcaatttgatgtccagcactttcctcacgcatcttcttgaattcagggaagccgttcttattatcgtcaataaagcctttggcaaatttcccattttggatatcggttaaaacttccttcatgccagctttcgcttggtcggtaatcacacgtggtccagaaacgtaatctccatattccgctgtgttagaaatcgaattacgcattttcgcgaatccaccctcataaatcaaatcaacgattaatttgatttcatgacaaacttcaaagtatgccaattcaggttggtaacctgcttcgactaatgtttcaaaaccagcctcaatcatactcgttaagccaccgcaaagcactgcctgttcgccaaatagatcagtttcagtttcttccttaaaggtagtttccaagacacctactcgtgtagcgccaatgcctttcgcataagatagcgctaaatcgcgagcagttcctgttgcatcttgatgaacggcaaataatgctggcaccgcgaagccttcagtaaaggtacgacgaactaaatgaccgggaccttttggagctactaagaaaacatccacatttttcggtgggttgataacatcaaagtgaatattgaaaccatgtgcgaaaactaaagcatcgccatctgctaaattcggtgcgatttcattatcgtataaagcaccctggatttcatctggagctaaaatcatgactacttcggcttttttggttgcttcagctaccggcaacacatcaaatccatcttcacgagcagcctcagcggattttccttctcgtacaccgatcacgacttgatgacccgtgtcacgtagattttgtgcatgagcatgtccttgagaaccatatcccaccacagcaattgtttttccttctaaagcatccttcgctactgcatcatcataataaactttaaccataatttttcctccaattttataaactatattaatagcaaaatctaaaaatagatcttgcgtttaacctctgctaaatccggttacaccggttcgtgctaattgcttaattccataaggtcgtaagacgtcgatacacgcgttgaccttttctgtcgagccagcaacctgtaccacgattgttttcagcccaacatccacgacatctgctcgaaatggatcaatcatcgcttgaatttctgaacgtgttgctgctggggcgctgaccttgatcaacgccaattctctttctaaatgtggctcatcggttacatcagaaaccttaaccacatcgatttgtttatttaattgtttcgttacttgttcaacatccgctaacgtgtcagcttgaatgataatcgtcattcgggattcgccgtctctttctgtccgacctaccgaaacactatccatatttacttgtcggcgattcaaaacactcgtgattcgacttaacacccctgcttggtcatgaaccattgctgtaatcatccgtctcattttaatcaactcccaacatctgatcattcggcatgccagccggaatcattggtaatacatgctccttgttgcaaatcattacttcaatcagcattggtccagcagtggcaaacgcttcttgcaaatccttttctaaggtggtgggatcagtaatttttttactaccaattccataggcctcagccattttcatgaaatctggctgctcgtggaaaacagattgtgagcgacgttcattgaagaatttctcctgccattggcgaaccatcccaagtgattggttgttcaatagaacaaacttaatatcgagattattttgattcaaaattgccaattcttgatttgtcatttggaaaccgccatctccaacgaacacaaccacagaatcatttggttttccgaattttgttccaatacctgctgggataccgtaccccatcgtccccaaaccgccgctagtaatcaattgtttagaaaattgaaaaggataaaactgggctacccacatttgatgttggccaacatccgttacaatataggatttgccttctgtaatacgtccgataatctcaatcacagcttgtggcttgatgactttttcattccattcatactttaagggatatctttgttgacgcgctttacaaaccatgcgccactcttcacaatcaggtgcaggaatctcaattgacagcatttgtttaagagcaacttttgcatcccctacaattggaatatcagtatgaataatcttgcctatttcaactggatcaacatctatatgagcgactttcgcgtgtggggcgaaagcttcaggcgaacaggcgagacgatcatcaaagcgactgccgatattaatcaataaatccgtctccatcagcgccatatttgctgcataggtaccatgcattccgcccattcctaagaaatacggatggtcctgcggtagtagccctaagcctagcaaagtagaaacagtaggtaactgatatttttcaacaaactgccgtaattcttcggcaccatcggcagctaccacaccgccgccaactaatacaatcggtttctcagctttcatcaataagttcattagacgttcgatttgtaaaattgatggtgtcaccgttggctgatagctttctaaatgaataacttcatcaatcttaggatttgcctttaacgtcgtgatatcttttggcaggtcgattaagaccgggccttttctgcctgtcgttgcaatgtggaaggcttcattgacgattcgtggaagctcttcaatatcccgaacttgatagttgtttttggttattggtacggtaatccctaacatatctgcttcttggaaagcatcttttccgattcccggcgtcgttacttgtcctgtaatgacaactaaaggtacagaatcaatcattgcatccgctatcccagtcactacattggttgcgcctggtccgctggtaacgattactactcctggttttcctgtagctttggcatatccttccgctgcgtggacagcaccttgttcatgacgtgtgagaatatttggaatcggttcatcgtaaagtgagtcatataagggtaaaacggagcctccaggatagccaaaaatcaattcgactccttgattttccaaacacttgattaataaatccgctcctgaatataggtgttcaacttctacttcttgtttcatttcttccacccccattcctccttttaatgtatttatttttctttcagaaaaataagtctcaagttcatgccgtatatcattccactagcttttttcaacttatctttcttccttttttgattatttcatattggcaactgtgataatcatgatggcattcgctttattcttcttctggtaattccataacgccgccagtgtgcgctgaagttaccattgctgagtaacgagctaaccagccttttttgacttttggttggaattttggtaatttttcttttcgtttagccaactcttcctccgatacagccacatttagtgtgcgggcagtcaaatcaatcgtgatttcatcaccatcttgaactaaagcgattggtccgcctgctgcagcttctggtgaaatatgtcctacagcgattccacgcgttgctccagagaagcgtccatcagtgattagtgcaacatctttccctaagccgcgtccaacaatacttgatgtcggtgccaacatttccggcattcctggtccacccttcggtccttcgtaacgaataaccacgacatgtcccttagtaacggtatgattatcgattgcttcaaccgcttcgtcgtgagaagcaaaacaaatcgcttttcctttaaatactttgatacttggatcaacgccgccaaccttgatcacactgcctgctggcgcgatattcccatagaggattgaaagacctccgactggactataaggagctgttttcggatgaatcacttcttcattcatgatcttggcagaagcaacattctctcgtaaagttttgccagtgactgtgatccgatctgaatgaatcgcaccttcaatcgaaactaattcattaatgattgctggtacaccgcctgcttcatgaacatcgtgcatcgaatagctggaagaaggagcgattttagataagtaaggaactcttttcgcaatcacattaatatctgattgatcgtaatcgatttccgcttcatttgcgatggccaatgtgtgaaggactgtattggttgaaccacccatcgccatgtctaaggcaaaggcatcatcaattgcttccttggttacgatatcccgtggtttgatttgctttttgaccaaattcatcaaatgcttcgctgattctcgaaccaattcacgacgctcgtcagaaacggctagaacagttccatttccgggtaaagccaaacctaacatctccaataaacagttcatagaatttgcggtaaacatgcctgcacaagaaccacaggtcggacaagcattttgttccatgaacaagaaatctttttccgtcatctgtccttctttatatgctcccacagcttcaaacattgaagatagtgtcgtttgatggcctctcggatcaattccagctttcatgggaccgccggaacagaaaatcgatggtacgtttgttcgcatcgcggccatgatcatccctggtgtaatcttgtcacagttaggaatgtagaacacaccatcgaaccaatgagcattgatcactgtttctgctgcatctgcaatcagctcacgacttggtaaagagtagcgcataccgatatgtcccattgcaattccgtcgtctacaccaatcgtgttaaattcaaaaggaattcctcctgcttcacgaatggcctctttagctacatcagctagttctcgcaggtgaacgtgccccggtacaatatcgatataagaattacaaatagctataaatggtttatccatatcatggatattttttacttggccagtcgcatataataaacttctggcgggtgctgcatcaattccttttttaatctgatcacttctcatagtcacatctccctgcttttagccaacccatttttccaactcaagaaaaatgagcttattttcatgcgcatatctttgtactaagttctttgcttgataaattgttatccatcattagttttacttttacgctaaatatcctgtgaaaagtacaactgacaaaaagagcatcccatcaataaatgggatgctcttgcaagaatcccatttctaacgcaaataggactcaaactaacggttgatactacttccgcgttctaagtcctggactcaataattaataagacgatgccatcaaaattattgtatttactcttgcgcataaaaatcggcccctcgtttttctaatagtttcttaatcatttttttatactatacatttcataagattaaaagtcaatgaattttcagaatattttctaacttagtaattttttggttcctcacatatctttctaaaatctataaaaaacaagctcaacgatgatcgttgagcttatccggcgaattgactattataaagatttgcatagaaatcgccttttttcattaaactgctgtgatttccctgctcgataatcgagccgtctttcatcactaaaattaaatcggcattcttaatcgtagataaacgatgggcgataacaaagctggttcgttcagtggttaattgatccatcgcctgctgaatcatcccttctgttcgtgtatctacacttgaagttgcctcatctaagatcagcaattgcggatctgccaaaattgcccgagcaattgttaaaagctgttgttgtccttgtgaaatctgagttccatcggaagaaatgatcgtgtcataaccattaggcaatgtgcgaataaagtggtgacattgagcatcttttgctgcctgaacgatttcttgtcttgtagcatccggtttcccgtaagcgatattatctgccactgttccttcaaatagccatgtatcttgcaaaaccattccgaatttttgacgaatctccgcacgtgagaaatgactgatattcttgccgtctacttcgatttgaccattggttagttcgtagaagcgcattaacagattaatcatcgtcgttttcccagcgcctgttgggccaacgattgcgaccatttgcttcggcttcaccttaaaattgacatcttccatcaacagcttgtcaggcgaataaccaaatgccacgtgtttgaaggctacttcaccacgcacattttctggaaccgaaagattcaatacttcctcaacctcttcctcctgatccaaaatctcaaaaatccgctctaatgctgcaaaagcactctgcaggctgttgattacatacgagacctgtgtgattggctcagaaacttgattcacgtattgaagatatgcttgaactaaaccaatggatagctgaccattgattaccatgatccctcccacgacggcactagtaacgaatcctaactgattaatcaatcgaatcaacggattaatcgcgaaacttacgaactgagcctttttaaaagcttgaaactgtgcttcattcaatttatccaactcatccgctgttgcttgctgacgattgtaggccttgatcagtaaatttcctgaataattctcttcggccttggtccctacagcgcccaaagccgcttgattttcggaaaaatactcttgatttttgtgagctaaacggtttgtaagaaatagactcactaataagatgatgacaatacccaatgtcaataacggacttaaatagatcatcactcccagtccaattacaatcgataaaattgccgaaatcatttgcatcaaaccaacctgtaaaacttctgataccttatccaaatcaagtgtcgccctcgttaagatatcaccagtcttatattgatcaaagaacttcataggcaaatgattcagcttttctgttagctttgttcttaaacgcaaggtcaatgtctccgcgacgctggccatcgtatactcctgtaataaggagaacagtgaaacgccgcaccaagctatgaagagccagactacgggctgtatcagagcagcaaatagattttccatagttacttgctgtgtacgaattaacgtgataatcgcgtctaatccccagcctaatatcagtggtgtaatagccattaatgcagcaaaacagatggccgaagcaataatgaccgcaaagcgcgttttctgctcaattaataatttaaacagacgaattccggtctttttaaattccttcggtgtttctgtctctacctttttttcatcaacttgcttgatgctcatgttttttcccctccattccttgagacttggcaaattcttggtaaacatgacaggtacgaagcaattcttcgtgggtgcctttaccaacaatctttccttcctccaaaacgataatctgatcggcatctttgatcgtcgatagacgctgagccacaatcacgatcgcagcttcagctagataacttttcaatgcctttcgcagtttggcatccgtttgataatccagtgctgaaaaactatcatcgaagaaatacaaatcagctggtttaattaaggctcttgcgatactcaaccgctgcttctgacctcctgaaaagttgttgcctttttgtgcgacaaacgcatcgaattgtccatctaaatcagcaataaaatcttcggcctgcgccactttagccgcctgtttcatttcttcttccgtcgcatatggatttccaaaaagaaaattgtccttaaccgtaccgctgaatagaaaagccttttgcggaacataactgattcgtgctctcaacgattcttgggtgacatttttgatggtttccccatgaaaacgaatttctcccttcgtcgtatctctcaaccgaagcagcgccttagcaatcgtactcttacccgatccagtaccgccgacaatagcggtcacacctttagggatatcaaaggtgatattggacaagacggcttcctctgctccactgtatgcaaagtcgacatgatcaaaaatagcaatcggctgattttctcttaactcaaaagctgcttttgacccatcaatgatttcttcttgtgtatctaatacctcgccaatccgctctaacgaagccaatgcttttggaatcatcacaattaccatcgccgccatcgtcaagaaccagagacttaaaattgtgtattcgctgatagctgttaagctcccaattggcacacttccttgaagcaccatgacgccgccaaaagccagaacagctgtcatccctactcccattactaaattgactgtaggattcaagacagcaaacagcttattgacccgaatcatgacttctgcataattactgaaggttttatccgtgcgtttcttttcaaaattattcttgttaaatgcgcgaattactcgaacacctgtgtagaattctcttaaaatctgcatcattttatccattcgctgctgcatcacatccgctaaaggaatagcctttttgataacagctagcgaaacaagtgaaaatagcacaatcgagacaatcggaatccagacaaagcgccaggaaattgctcctgtcaacacaatcgaagcaagacaaatcaacggtgcagggatgatcatttgaaagaccatcatcatgatttgttggatatttgttatatcactcgtcgttcgagccagtaatgtcggcgttccaaactcatccatatccgccattgataagcgtagtgtcttatctactaaacgttttcgcaaaaagtaaccaaaacgaccggccaaaattgccgaataatagctggcaataatcgagacaatccctgttaagaccgcaattcctagcataaatgcaccatttcgccaaatcgctccttgatcttgagttaagatgccttcatcaataatttcagcgacatagtaaggaatcatcagtgttccgaccgcttgcacaatcattaagatgaaggtgcctaagaacatcctttgatattctttgaaaaagattttgaatagtttcatcttttttccctccttctcctatggtagaataaactgtgacgtaacgttacagtcaagcgaaaatgaggattagttatgaaaaaatttttaacgatcagcgagatggcaaaatatgcaggcattagccgccggactttgatttattacgatcaaatcgaccttttcaagccagccaaggtcggtgaaaacggctatcgctactatgggattgatcaatattttgaattagacgttattctcttattaaaaaatctagacgtttctttggaggatatacatgtcttcttaaaaaatcggaatgtggattacgttcttgatggatttatgcgacagaaacagaagattgatgaacaaatccaaaaattaggtgggattcgcagcgcactagatagctacattgaacgctatattacattaaaaaactttgatttagaatccatcacttattcttatcgcgaagcggaatctttcgtcatttctgatatcatcgaaagctacgacgatattgacgctgcccagatttacggacgtttttattcctctgttgacagcagtgatttattcagtggctatccgattggctttttagtagatggttccgccttttacgagaaaaattttcatgctgctccctatcgagctctcgtaaaaatacctgaagagcgcttgcacatctataatcggcaacgtgttgttaaacgaccagctggagattatgtttctgggtttatgaaggacgagattcaccatattaatacttttaataatcgcttcagaaattacctgaaggagaataacttggagttaaacggtgatatctgggaattgctatggcaggatgaaacgacctcggaacatcccgaagatcaagtttttgaagttttaattccggtgaaacctaaagagtaagactaaatagccttgacactcgatatttaagaatgataggatgaaaaagaatttaaggaagggagagagcaagatgagtaagactatcaaaataaaccaaatacaatcgattgatctgtttgatgcgttttatccgaacagagagtcttcatccatagactctctgtattcgtaaataaagcctatttgtgaaactgtcaatccgatgattggcagtttttttgcatgttctgctttttgcagtttgtaaagtatgagtgtttaatcgtcgcttttcaacaaatattgaggacaaaatatctagcagaatgatatgcgcacaaaagtgaacttccctgccgttgagttatcgacgacctacaaacatgaataatcaacaacattgatggaggtgtttcctatgagtggaaaaagaagaaaatcagagaataatacaaattaactgagggatcgattgattcctcaaagagaggattcaatatgttaacaattaaaggaaaatacaatacagcaacagtctataccgacattttaactgacagtacagtcggtcaaatcatgactctatgcaatcaaaaattcgcacaagatgccaaaattcgaatcatgccagatactcacagcggctcaagcagcgttatcgggacgacgatgacaataaaggatcaggtcgttcccaaccttgtcggcgtagacatcggctgcggactaaatgtaactaaatttagaaaaggtgtcaaactgaatttcgataaattagatagaataattcgtaatcggattcccagtggacaccattctcacagcaagcctttatatagttttcccttagaaaacattcaggcgccgattcatcgcggatgggccctacaaagcttaggaacattaggcggtggcaatcatttcatcgaggtcaatgaaggcagtgatggattttatttggttattcgcagtggcagccgcgttttaggcaaagagatcgccgaataccatcaggaaatcgcctatcaaaagctgacacaaatgcggcaagatttaaaactgcaagcaaaagcagcgaatgaacctgatgaaaaagcggatttgattcagcaacgggaagaaataaaaattccctatgatttatcttatgtgtcagatcaagatttggagaattacctgtcagatatgcagattgcacagcaatacgcggtatttaatcgtcaaagcatggcgcagacgattttaaaagcaatgaaatgggaaaagcaggttattgaaagctttgacagtccccataattatattgatttgaagcatatgattttacgtaaaggggcggattctgctagaaaaaacgagaaaatgattgttcctttaaatatgaaggacggttctattattggtgtcggaaaaggcaatgacgaatggaatcaatccgggccccatggagctggtcgcacaatgagccgctctcaagctagagcatcaatcaggctggaaaactaccagcgtatgatgcggcatgtttggacgacctctgtttctaaaaaaacgctaaacgaagcacctaaagcgtataaatcaaagaaacagatactgactgatctgcacgaaacaatggaagtaaaagaaatcatccgaccattgtataattttaaaggttaattaatcgtcggttaagtccgtggaaaaaaatttacaaaataaaaattgattagcgttttcaaattcaaagttgctaaactttaggtgaacgcggaggtaatcggaaataccggataagcgaaatttttttaagatgatttatcatcacgaaaaaggattcgcttatccttttttgtttggcattgtcatctaagaggttttcatatgccaaaaactcgacacgtcactcccaacatccgcaaagaattcgcccgctttgctatacctgccgttatcggtatggtcgtctcgtccctgtacaatatcgttaatggtattttcgttggacaaggcgttggcgaaatgggattaggcaccatcaatatcgtctatccctttatcatgctggaaatagctatcacaatgacgacttgccgtttactcgggaccaatgactggctcctgacttatgccaaagaatacatttggtggatcgctttattcgggatcatctatatgccaggattgggattaagtattttcgttcggaacaataatgcgcctttgactagttgatcactactcattaatagttaagcctaagaaagcatttttgtcacattataatctagtttatccgtttgtattattaagaagacccggagaataagccttcgtgaatgtcgaacgtctcaagtcaatgacattgttgatttatttttttgcagtactgagttttgctaatcgtttgccaattgttctattgcttcatgggttttcgacacttcaatacccgcttcagctaatttttgattccatgaatcaattactttttcggcattcttaacaaacgtactatgagcatcttctaatagaaacgtttcaaaacctctcgattgactctctagacaagcggcctgcacacagccatttgtaacaaatccacatatgtatatcgtttgtatattcagcctttttaataattctataaaattctcctccgcaaaaatattgcttcttttcttattaaagtaaatcggggtttctgggcatctaatggtagaaacgagctcccatgaacctgtttcagcaactaatgaagttttattcgtgtgtcgggtaaaaaggattggttgttgaatagtatcaaatttatcgataagtaaattgatatttgaaattatttggtttttcttatgaatccctctatcaagtaccccggtttgaccatccaaaactagcagcattttcttcaacatttgaccctccagaaatgaactctttcttgaaataatacttctattttaaaccatcacattgttggagagtcaagttgtgaatcaaaaaaaaactcaacagatttctgctgagtcttcattagggcgaatgatgggaatcgaacccacgagtgtcggagccacaatccgatgcgttaaccacttcgccacatccgccattaccctattcaatttcaaataaaaaactaagatgaaataaccatcttagctctttataccggcggccggggtcgaaccggcacgcccgtgagggcactggattttgagtccagcgcgtctgccaattccgccacgccggcatgtcaataactattctagtactaaggcggtaaccggatttgaaccggtgatgaaggttttgcagacctctgccttaccacttggctataccgccattatactattgttttcttcttagaacaagcatttttcaagagagtttcctgaaacttttctaagaaaactggggtagctggattcgaaccaacgcatgagggagtcaaagtcccttgccttaccgcttggctataccccaataattacaagggcgaacgatgggaatcgaacccacgagtgccggagccacaatccggtgcgttaaccacttcgccacgatcgccatattaataatgaaaacaggggcagcaggaattgaacccacactaacggttttggagaccgctgttctacctttaaactatgcccctgaaacaaatggaggagagtggattcgaaccactgaaccctaaggaacggatttacagtccgtcgcgtttagccacttcgctactcctccatggtggcgcgggacagaatcgaactgccgacacacggagcttcaatccgttgctctaccaactgagctaccgcgccatatataatagtttaaagttttcaattaaatggcggtcccgacgggatttgaacccgcgatctcctgcgtgacaggcaggcatgttaacccctacaccacggaaccgaatggaggttaacgggatcgaaccgctgaccctctgcttgtaaggcagatgctctcccagctgagctaaacctccatatctttaattaaatgacccgtacgggactcgaacccgtgttaccgccgtgaaagggcggtgtcttaaccgcttgaccaacgggccaataaaaaacattgctacggagagtaagggattcgaacccttgagacaggaatacccgcctacatgatttccaatcatgctccttcggccactcggacaactctccaagataggagcacaaaggcccaatactctataattattctctttcgagaaactccggcagtaggactcgaacctacgacatcatgattaacagtcatgcgctactaccaactgagctatgccggaataaaccgcgtggcgacgtcctaatctcacaaggggcaacccctcactacaatcggcgctaagaagcttaacttctgtgttcgacatgggaacaggtgtatccttctcgctatcgccaccacactagtatttaattgagtaaacgtcgttcactcaaaactggatcagaaacattctaacaaccgtgaatcaatttttggttaagtcctcgatcgattagtatcagtccgctccgtacatcactgcacttccactcctgacctatctacctgatcttctctcagggatcttactttcttaaagaaatgggaaatctcatcttgaggtgggcttcacacttagatgctttcagcgtttatcccttccctacatagctacccagcgatgcctctggcgagacaactggtacaccagcggtaagtccatcccggtcctctcgtactaaggacagatcctctcaaatttccaacgcccgcgacggatagggaccgaactgtctcacgacgttctgaacccagctcgcgtgccgctttaatgggcgaacagcccaacccttgggaccgactacagccccaggatgcgacgagccgacatcgaggtgccaaacctccccgtcgatgtggactcttgggggagataagcctgttatccccagggtagcttttatccgttgagcgatggcccttccatgcggaaccaccggatcactaagcccgactttcgtccctgctcgacttgtaggtctcgcagtcaagctcccttgtgcctttacactctgcgaatgatttccaaccattctgagggaacctttgggcgcctccgttactctttaggaggcgaccgccccagtcaaactgcccatctgacactgtctcccaccacgattagtggtgcgggttagagtggtcataacacaagggtagtatcccaccagcgcctctgtcgaaactagcgtcccgacttctacggctcctacctatcctgtacatgtggtacaaacactcaatatcaaactgcagtaaagctccatggggtctttccgtcctgtcgcgggtaacctgcatcttcacaggtactaaaatttcaccgagtctctcgttgagacagtgcccaaatcgttacgcctttcgtgcgggtcggaacttacccgacaaggaatttcgctaccttaggaccgttatagttacggccgccgtttactggggcttcaattcgtaccttcgcttacgctaagcactcctcttaaccttccagcaccgggcaggcgtcagcccctatacgtcatctttcgattttgcagagacctgtgtttttgataaacagtcgcttgggcctattcactgcggctgatcgttagatcagcaccccttctcccgaagttacggggtcattttgccgagttccttaacgagagttctctcgctcaccttaggattctctcctcgactacctgtgtcggtttgcggtacgggccattgttttctcactagaagcttttctcggcagtgtgacatcaggaacttcggtactattatttccctccccatcacaacttgtccttagagatgtaagcatttgactcacatcaagactcattgcttggacagacatttccaatcgtctgattccttagcctcctgcgtccctccattgctcaaacaaaaacaacgggtacaggaatatcaacctgttatccatcgcctacgcctttcggcctcggcttaggtcccgactaaccctgggcggacgagccttccccaggaaaccttagtcattcggtggacaggattctcacctgtctttcgctactcataccggcattctcacttctaagcgctccagcagtcctcacgatctaccttcaacgcccttagaacgctctcctaccaacacaccattggtgtgttccacagcttcggtaaactatttagccccggtacattttcggcgcagggtcactcgactagtgagctattacgcactctttaaatggtggctgcttctaagccaacatcctagttgtctgtgcaaccccacatccttttccacttaatagttatttggggaccttagctggtggtctgggctgtttccctttcgactatggatcttatcactcacagtctgactcccagagatgaatggatggcattcggagtttatctgaattcggtaacccgagatgggcccctagtccaaacagtgctctacctccatcattcttactctgaggctagccctaaagctatttcggagagaaccagctatctccaagttcgtttggaatttctccgctacccacacctcatccccgcacttttcaacgtacgtgggttcggtcctccagtgcgttttaccgcaccttcaacctggacatgggtagatcacatggtttcgggtctacgaccacttactcattcgccctattcagactcgctttcgctgcggctccgtcttttcaacttaacctcgcaagtaatcgtaactcgccggttcattctacaaaaggcacgctatcacccattaacgggctctaacttgttgtaggcacacggtttcaggatctatttcactccccttccggggtgcttttcacctttccctcacggtactggttcactatcggtcactagggagtatttagccttgggagatggtcctcccggattccgacggaattcctcgtgttccgccgtactcaggatcctcctaggtgccagtcaaattttgtctacggggcttttaccctttctagcagacctttccaggtccttcgactatctcactggactaccatatcggagtcctacaaccccaagaggcaagcctcttggtttgggcttttcccgtttcgctcgccgctactcagggaatcgatttttctttctcttcctgcaggtacttagatgtttcagttctctgcgtctacctctaatcagctatgtattcactgaaaagtaacatcctataaaagatgttgggtttccccattcggaaatctccggatcaaagcttacttacagctccccgaagcatatcggtgttagtcccgtccttcatcggctcctagtgccaaggcatccaccgtgcgcccttattcacttaaccttatcttgactttcgtcaagggtcttactaattcccatgagcgatcatgttccttagtaataaataagcaattgaacttattaaaaaactcattcaacgcggtgttctcggtttgtttaaaattgtttctgtatccagttttcaatgaacgaatgatgactgacgtcatcaatggagcctagcgggatcgaaccgctgacctcctgcgtgcaaagcaggcgctctcccagctgagctaaggccccgatattgctatctaattgagagtaaacctctcaaaactgaacgaataaaacattcctgtgtagtttccgtaacgttcatcttcgatgaactatttccttagaaaggaggtgatccagccgcaccttccgatacggctaccttgttacgacttcaccccaatcatctatcccaccttaggcggctggctccaaaaggttacctcaccgacttcgggtgttacaaactctcgtggtgtgacgggcggtgtgtacaaggcccgggaacgtattcaccgcggcgtgctgatccgcgattactagcgattccggcttcatgtaggcgagttgcagcctacaatccgaactgagagaagctttaagagattagcttagcctcgcgacttcgcgactcgttgtacttcccattgtagcacgtgtgtagcccaggtcataaggggcatgatgatttgacgtcatccccaccttcctccggtttgtcaccggcagtctcgctagagtgcccaactaaatgatggcaactaacaataagggttgcgctcgttgcgggacttaacccaacatctcacgacacgagctgacgacaaccatgcaccacctgtcactttgcccccgaaggggaagctctatctctagagtggtcaaaggatgtcaagacctggtaaggttcttcgcgttgcttcgaattaaaccacatgctccaccgcttgtgcgggcccccgtcaattcctttgagtttcaaccttgcggtcgtactccccaggcggagtgcttaatgcgttagctgcagcactgaagggcggaaaccctccaacacttagcactcatcgtttacggcgtggactaccagggtatctaatcctgtttgctccccacgctttcgagcctcagcgtcagttacagaccagagagccgccttcgccactggtgttcctccatatatctacgcatttcaccgctacacatggaattccactctcctcttctgcactcaagtttcccagtttccaatgaccctccccggttgagccgggggctttcacatcagacttaagaaaccgcctgcgctcgctttacgcccaataaatccggacaacgcttgccacctacgtattaccgcggctgctggcacgtagttagccgtggctttctggttagataccgtcaagggatgaacattctactctcatccttgttcttctctaacaacagagttttacgatccgaaaaccttcttcactcacgcggcgttgctcggtcagacttgcgtccattgccgaagattccctactgctgcctcccgtaggagtttgggccgtgtctcagtcccaatgtggccgatcaccctctcaggtcggctatgcatcgttgccttggtgagccgttacctcaccaactagctaatgcaccgcgggtccatccatcagtgacgcaaaagcgcctttcaaaccgaaaccatgcggtttcgattgttatacggtattagcacctgtttccaagtgttatccccttctgatgggcaggttacccacgtgttactcacccgttcgccactccttttctttcggtggagcaagctccggtgaaagaaaaagcgttcgacttgcatgtattaggcacgccgccagcgttcgtcctgagccaggatcaaactctcataaaaagtgtttgaaacagtcttgcgactgttaagctcaattgtattaattgacttgctagcatattgcttgctatgttgtttgcttctatataatagaagcgccctacacatttggtttgttttattcgttcagttttcaaaggtctacattgttcgtcgctttgtttcagcaacttttatatcatatcaggttttcattcaaaagtcaacaacttttatttaaaaactttttgataaaaaaacaagtttgctgcgcgtttcgttcaagcgactttataaaaataccacaagattattcatccgtcaacaattatttttaatttttttcaagatgttttgttctcgtgggaacatttaataatatagcaatcttcaagcagtaatgcaactattttttgtagtttttttcaatctttttaatttttcgaacgttcatttaaaactctaaaataacgttcgattttaaaacaaaaataacgctatcttcacctaaaacttttttgaactttcgcataaaaaaacagctaagttctactcagctgttttctcttctaccattgggataaaaattctaaagatggtacccttgccgacagagctttcgacactaatactccctttataactttctaaaagtttgtgagcgattgatagacccagtccatttccgccttttgttcgagcacgagctttgtcgacgcgataaaaacgattaaacactttatcaatgtcttcgtctggtatcccctcaccaaagtcctgaatcgcaatctcaaacttatttaaggttgatgaaactgatatatgaacctctttacgatcagttgaatacttcacagcgttatctaaaacaataattagaatctgctccaaatgattacgataaatcttcaaaattctttcactatctaaatcatcatcaagggtgaaggtaaactcagggtaaagcagtttaaagttgttaaatacttgatttgtaacttctttggctttagaagtctcattcccgtaatacacatctacttgttcggccctagacaaatcgagcatttcttgtaccaggctcttcatccgaacaagttcctgtagactagcctgaatcgactcgtccaaaatctctggatcgtctttcccccaacgattcaacatattcagatgtccctcaatcactgcaactggtgtccttaactcatgagaaacatcttccacaaattgctcctgctgctcaatatacatccgaatacgatcaatcacatcgttaaagatgacggctaaatcagatagctcgtcatttgtagtaatctcaggtacgtgaacttctgcctgtgggtcttgtctgatgatttccatcgtatctcgcagaatcttcacaggtttcaggaagtacgaagacaataagaagcctaagaagctgctcagaagcagcgaaacaatttctagtacaatcaatgtcaacaataacttactgcgcatctcgtaaaaatcggataactcataaaagacttgtgcatacccgattttctcacgtgttttttttgaatagattggttctactgataagaacccgttcttttcatctacagtcacgattgtcggttctttgcgttttgtctgaactaagggttgatagtttttttgtgttttaaaaattagctttttgtctaaattatagatatctaacgataattgacgttggcctaattctgagataaattcgtcaatccgcatcatattgccctctaaggtcatgttttgatcatacatggcattatcccgtgcacccgattcggttagcgttcgataggtatttaccaacgttaactcctcatccgcattcgctaaacgggaagtgacttcagagattgtgcgttcaacgttgtttctttctttcgttacgatcagattgaccgaagacttataggtgatcacagcgaagatcgtaaataccacgaatataaagaaagaacttgtaaaggcccacttgatggtgagtgagggccctttcagttctcgttgtttcttgataaattttctcatgagcgcataacgtaaccagtaccgcggacagtttgaatatagctgtcttctcctggtacatcaatcttattacgcagataacgaatatacacatccaccacgtttgtttctacttctgtttcgtagccccaaaccttgttaagcaaaacatcacgggcaagtacaacattgacattttccataagcgtcaatagtaattcgtattcacgtttagttaattcaatgatttcatttccgcgacgcacgacacggttttctttttcgatcgttaggtcacgataagtaatcgtcgtttgtttagcaacattcttatcgccttcaatatcgattcgacgaagcaaagcacgtaaacgtgctagcaattcttcaatcgcaaatggtttgacgatatagtcatcggcaccatgatctaaacccgaaacacggtcgatcacagagtcacgggctgtcatcatgatgattggtgtattttttacttgtcgaacacggcggcaaacttctaagccgttcaattcaggcagcatcaaatcaagtaaaatagcgtcccagtcactttctaatgcggcttcaagtcctgttctaccattataatgaacttctgtatcatagccttcgtgcttcaattctagttcgacaaaacgagctagatttttctcatcttcaatgatcagaatattactcatttttttagttcctttccaagttgaatttcattaaacctttatcattatagggctaaaactgtcaaaaagctatagttagttcgcgtaaaagttataaataacttctgctattcttcgtggtaccagctatagtgataaatcccttctttatcaaggcgttcataggtatgtgcgccaaaataatcgcgttgagcttggatcaagttcgccggtaaacgttcagcacggtaagaatcatagtaagtgatagcagatgagaaggttggtacaggaacccccgcttgaacagcaatcgcaacaacttcgcgaaccgcttgttggtacttgtcagtaatttccttgaagtaatcatctaacatcaagtttgccaaatcggcatccttctcataggcatccgtgatcttttgtaagaagcgtgcacggatgatacagccagcgcgccaaattttcgcgatgtcgccaaatggtaaatcccaaccaaattctttggaagcggcacgtaactcagagaacccttgtgcatagctcatgattttgctgaagtacaatgcttcacggattttttcgatcaattcttgtttgtcgccgtcatatttataaggtgccggtcctgataaaactttgctggcagccacacgttcttctttatacgcagaaatgaaacgtgcgaagacggattcagtaattaatggaagcggcacacctaagtccaatgcgctttgagaagtccattttcctgttcctttattaccagctgcatctttgattacatcaacgatcgccttatccgtaccttcgtcatctttacgagtcaagatatccgcagtgatttcgattaaatagctgtctaattcccctttattccattctgagaaaacatcagccatttcttctacagacaaaccaagtaggttttgcatcaaatcatatgattcagcgattaactgcatgtccccgtattcgataccgttatgtaccatttttacgtagtgaccagcaccatttgcgccgatataagtgacacatggttcgccgtcttctgcttttgcagcgatttgttcaaagattggagcgactaagtcataggcttctttttgtccgcctggcatcattgaagggccttctaatgcgcctttttcaccaccagaaacaccagtaccaatgaagttgatgcctgagttcgctaattcttcgttacgacgaatcgtgtctttgaagaaggtatttcctccatcgatcagaatatcgcctttatctaaatgcggtaatagtgattgaattgttgcgtcagtcgctggacctgcttgaaccattagtaagatacgacgcggagtttcgattgaagcaacaaattcctcgattgaaaatgtcgcttttaagttgcgatcaggatgttcttctactaccgcttcggtttttgatccagtacgattatacaaagccactgagtacccgcgactttcgatattcaatgctagatttttccccattacggccatacctacgacgccgaattgttgttttgacataattatcctcctagttcgaattgatgtgcagatttttctataggaaaaataaggtggcttctcaccacatgcaatcttctactgattatgtatttacaccaagtagagttagcatcctataatactcaatacgattctcattatatcctaagaaagtgagaatggaaaatgaatagtgtttttaatctaaaaagccttgataaaacctgccaatccttataaaaacgatagatttttcgcaaatatgacaaattgttatctcgcctaattccaagaaaaaaacctcaagactccatggttagtcttgaggttttgactttctctattaaaaagtgcttatgcttctttagacataacatcttttccatcatagtagccacagttggcacatacgtgatggctcttcttcatttcgccacagttaggacattcgtttaatcctttaatggtcaatttgtagtgagtacgacgtttgttctttttagcttttgatgtttttctagctggtactgccattgggtgttacacctccttataaaatgaagtatcatttactgatacattttattccaatcttacttgtcatcttctgattcattgaataactcagataatttcgcaagacgaggatcaattgtttcagccgattcctctttcttctgcaagtacgcttcttcactgataacttcccaatcattgccttttggcatgtcagaagatttcagttcttcttcagtaaacacctgcagcggaatcgctaataaaatgttatcttcgatagaattggttaagtcgatcgtatcattgtctaggacaaggatctcttcgtctcgttcttcttccatagaagaccattgctcccgtgtcatgaatacttcgtccactgacagatcaagtggcagatcaactggttccaacgagcgggctgaaggaacagttacaatagttttcaaccgataatgtaaaatatattcattttttccgacagataagattccttccacagtaaccggagtcactgctaagacttcattatcacgggctgtcaatgcgtcattcacatcgatcgtttctgaaaaatttagtgcttcttctttatagcggcgcaattcgccaatcgaccatttcattattcatcacctctaagcaacaatcgatattatacaggtggaaaaaacctttgtcaatgaaattttcttgacaccccgaaaggctgtacgaactcggtcagattttgagcaataagactataatcattctaaattgccaagaaacacggtgagcgtagagaaccgatgttgattggtacctacttggcgcttttcagatttcgaatgattttcgcttattgttgaaaaatctagttcgggaagccagacacccttaaaagctagctcagaaagctggatatcaagaaaggctgtacgaactcggtcagcttcgccagttattcttcacactttagcgtggttagaaaaattctatctactttactgagctagataacatacgtccatcacaaaaaaataatcaagtctgatcccctgtatctttcatagaaaaggactgtggcatgaatgccgcagtcccgatatttcttgttggaacaactatctagtgtttagatcgctgttgtttgtccacggtacacgattccacgacgaggatcaacagtgactaattcaccatcaacaactgtggaagtcgcgctatctgcaccaactactactgggatatcttgagcgataccgacaactgcagcgtgtgaagtcaatccaccatcttcaacgatcaaagcagaagctttttcaattgcaggcatgtaatctttgtcagttgttggaacaactaaaaccataccgtctttagcttttttgattgcttcttcagcgtttttagcaacaactgcatgagcaacaactgttgattcaccgataccttgagcttgtaataatttagaaccgatcatttgaactttcattacgtttgttgttccacgttcaccaactggaacaccagcagtaatcaagatcaagtcgccttctttagcaaaacctaagtcaacagctttttgagcagctaaatcgaacatatcgtctgttgttgttggtttttcagcaactgttgggtatacgccccagttaaccatcaagctgcgttttgtatgttcgtcaaaagttactgccaagatgtcagcatctggacggtatttagaaatcatacgtgcagtgtgacctgattcagtcgcagcaacgattgttttaacacctaagtttttcgcagcgcgagctactgaaagaccaattgtttctgttacgtttgatttgtcgaattcgttgatttggaatgatcctagttctgacaatgcagattcagcttccatatcgatacgagccattgtgccaacagcttcaactgggtatttaccatttgcagattcaccagaaagcattgtagcatcagttccgtcaaatacagcgttggcaacgtcagatgcttccgcacgtgttggacgtgggttttcttgcattgattctaacatttgagtcgctgtgataactggtttaccagcgtagttacattttttgatgatacgtttttgaaccataggtactaattcaggagcgatttcaacacccatgtctccacgagcgatcatgataccatcagaaactttgatgatttcgtcgatgttatcgattccttcttgtgattcaattttagggaagatatgcacgtgtgtcatatttttttcttcaaggatttcacgaatatcaagaacgtcttgtgctttacgtacaaaacttgcagcgatgaagttaatgtcgttatctagaccgaaacgaatatcgtctgcatctttttcagtgataccaggtaagttgattgaaataccaggagcatttacacctttacgagaacctagcataccagcatttttaactagcatgatcaattcgcggtttgcttcgtctttatcaatgatttccatgtcgattaagccatcatcgaataagatatgtccgccgatatgtgcatcgtcgaataagcctgggtaagtaacagcgattttttctttcgtccctttatgttctgggtccattgagatacgtgttttatcgcctacgttaaattcaatatagccagcacggccgtagtctgcatcagttgtatcttgaacagttgtacggatttccgcaccttttgtatctaaaagaataccaacatctttaccagtctttttcactgcttcacgaaccatgttcatacgtgtaagttgttcttcgtgatctccgtgtgagaagttgaaacggaacacgttagcaccagcttcaattaattctgagattgtttcaactgagttacttgctggtcctaatgtactaacgatcttcgtttttttcattacgtaatacgctccattcttgtttcttgattgtttataatatatagctctacactattattaacgagtttaaaatgagatttgatgatttaattcgtacaatgacaaatctggtttgtgcttgttgttttccaacgtttctacgatatcagaagcaatcacttcattttcttcgataccgatacataatccgcctttaccttctaacaataaatcaacggcatatgaaccaaatttgctggctaatacacggtcgcgggcacttggtgagccaccacgaaccacgtgacccaacacactcacgcgtgtatggaagtcgccgtattcagctaatttttcagcaaattcatttccgcccatgacaccttcagccaaaatgatcaagcaatgtttcttcccgcggtcacggcctgcttggattttcttagcgatacgttccatatcaaagtcatgttccggaataacgatttcgtccgcaccaccggcaacaccagaccataaagcgatatcgcctgcgttacgtcccattacttcgatgacgaaagtacgtacgtgtgaagtcgctgtatcacgaatgcggtcaacagattccaagacagtgttgatcgctgtatcaaacccaacagtgaaatctgttccagggatatcattatcgattgtgcctgggataccaacagcagggtagccatgtttcgtcaaggctaatgcaccatgataagaaccgtcaccaccgatgacaactaatccttcaataccgaattttttcaattgttcgatcccttttaattgcccttcttcagtagcaaattctgggtaacgagctgaatataagaaagttccgcctcgttgaatcttgtcgccgacgtcagcaacatccaaacgacgaatatcaccagcaactagaccagcaaaaccataattgatgccataaacttccatgccttcaaaaatcgctttacgaacgaccgcgcgaacggcagcgttcattccgggagcgtctcctccacttgttaaaattccaatgcgtttcattttctcacctcataagtattctcaaaaaaacatacatcgtttaattcatggtacattctaccaaaaaacatcccaaaagtcttgggatgtccacgggaaaaagcggtattttgcaaaaagtttttgaaagttacaagaaatcatcttattacgacgctttgttcccctaatatgtcacgtaaagcatttatgagagtgtcattaacccccacccaaaactttttatccagcacaatcttccgtcgatttttttcatagaagatcacaactggaacttttccaggtgacagttgaagtctttcggcaattccctgctgaatttcaggagaatcctgttctgcctgcacacgcaaatacaaagttttatcactgatgtcctcttctgctacttgcgcaagagtcatttcttccactaataattggatcgcctgatcatacttactgcgctccactttaccttggacgagatagactttttctaactcaagctctttgcgtaaacgtcgataggtttgcggaaaaaccgttaaggaaatttcgccgctttgatcattgcctgttaagaaggccatctgttcacccttcttcgttcgaatctcacgaatatcttttaaatagaagagaattttcccgtgactgccgacagttagttcagaaatcggttgtaaatccttttgcttcagcagtttaggaaagttttcagttggatgacctgaaacataaagacccagatactgttcttcataattcaaacgctctgccaacgtataatcctcagacggcctttccttcaaactcatcacatctagtaaggagatgctgccgccgctatattgtacattttgaattttcccctccaatccatcggccaattcacgacggttgggatgcaactcatcaaaagcaccaatgaaaatcaacggtgcgatatactcatttttcagccaacgagtttcgattcgcaacaggaattgatccaaggacttgaaaggtccttcctctttgcgggtggtcaaaatatcactgacaaaatcacgacgcatacccttaatggcgtctaatccaaaacggatcaggtctttttctaccaaagtaaaactgtagctgctacgattaatatccggagctaataatttcacacctgctcgattagcttcggcaatatattcccgcaatttctttggatcattccggactgactgcatcaacgcagtgtaaaatgctccgggataatgaaccttcatataggccatttgataaccaacaaagctgtaagctaccgagtgggatcggttaaacccataattggcaaaacgttcgatgtagtcatacacctcttcggcactcttctgactgtgtccgcgaccgatcgcaccaccaacaaaatgacgcctttcttcatctaataagtcttttttctttttactgacagcgcggcgtaggatatcggcttcgcctaagctaaagccagccatttgagcggccacctgcataatttgttcctgataaacaataaagccgtaagtcggtgccaagatttcctgcaccgagacatcaggaaaagtcacttgctccttgccattttttcgagcaataaactgatcaataatttgcatcggacctgggcgatacaaggcattcaccgctacgatatcttcaaaggatgttggatgcagatttcttagaactttacgaatacccgccgattcaaattggaacacgccactggtctcgcctcgctggaacaaggcaagcgtttctggatcatctaaaggtacatttttcaaatccagctcttcatgatacacgcggcgaatattttgctgagcattatcaataatggaaagattccgcagtcctaggaaatccatcttcaatagtccgatagcttccacatcagacatcgtaaactgggttaacaaaatatcctccgagccattttgcagcggtacaacactgattaagttcacatcactgatcactactccgccagcatgagtggagacatgccgtggcaagccctctaaagtcaatgctgtttggaacagtaatttacttcgttcatcatgagcgactaatcgctttagtggttcagatttgttataagcctctcgtaaagtaattttcaactgatttggtatagcttttgaccagcgattagcttcactttgagataacccgaatactcgaccgacatcccgcaataccatttttgctgccatcgttccaaaggttgcaatctgagaaacatggaagtgtccatatttttcgtgaacataatgaagaacttggttacgacgattgtcaggaatatccagatcgatatcgggcatgctgtttcgttcaggatttaagaaacgctcaaacaaaagattgtatttgatcggatcaacatcggtaatacttaacacataggccactagcgagcctgccgctgaaccccgtccagcgccagagacgatcttgctgcgatgcacataatccatcacatcccagacgatcaggaagtaatcatcaaagcccatgttatggatgattcctaattcacgagtcagccgttggcggtattcctctgtcacctcaccgattcgttcaggtaatttctgccagcaaagctcctgcaaataagcatccgctgtctgctgattcggtactggataatgtggcagcaatttctgatgcaaaggcaagtcaaattgacaaacctctgctaaatgctgtgcattggccaaagcttgtttatcttcaaaaccagcgattagtttccccatctccatcagataattatcgcctaattgattcgttaattcctcccgaggaagctgagtaccgttttgaatgtgtcccataatttttatcgcgaaggcttgttccgtttccaaacatgccacctcgtgaagtgctattttcggccagctttctgacaattcggaggtctttgtttttgatgaaatccctagataaaattccccgttaataaggtcagcgatctgtgagaagactgcttcacttggatcatacaagttatctactggtaaaacgctgattagatttttcgcatcaatattataatcagctaagctcagcggcttttcagacatcatccgtgtgctggatagacgcattaactcctgatatccagcaacatttttcccatagaacacgattttttcaattgactcttcaaatgtgaaatccaattccaagccaatgattccagtcatttgatactttttgcaagcattaaaaaactcgaccgcgccgtataaaacattctcatccgtaatcgcaatcgcagagtacccgcgtttcttggctgctaagacatattcttctatcgttaacgtacttttcaataatgaataggaagttttcgtataaagttgtggtatttgcatgatttcctcctatttaacgtaattatttttgtcgatgaatcaactaataagtatagcacgaaatttttggcgctaaaactcaacaaaaattacctgttttctatttagattttccgcttattttcataggccttttctttacattttcaaaaaaaatgctaaactgaacctagatatatttgcgaaaagaggtgctcttgatgaaatatctagttacattattttgggctttcgcaattggacaagccgtttgttacctaggcggtgccttgcaaagtgcttcttataactttgaattatctacgattatttctctaattgttggagttatcgcacttgttgcggcgcgttttgtttcaccaaaaaaagccaaagcatagacaaaaccagttactatattgtaactggttttttgtttttttcctagttggaaacgattgaagattatttatctaatttccaccttaaatgatagtttcgaaaaattgcatacgattttttcttattttaaaaatccttttatattactctatcaaaatgtttcaatgccaagcattccaccgcatatctaaacaacacaatgtaaagtgcaatagttataaaattcttgaatgacaagttcgataaatactgttttggtacaaaaatatttatcgaatacaacagtgtgatatttaatgagatagtactataatattactgtattagccttatttttaacaagttttcatctttcatcattcttatattttcttgtctttgatttattgaaattctcactcaaaattataaatacgatcatactgaaagcataaaatactgtgattatttttcccaacatctctaataccgtaaattaatcctccttaattctttatgtaactacttcgttatatagctaaaacaaaaaatcctttcctctactcttagatggtgtaaacaaaaagcagagaaaaggattcaattataaataaaacgatatctccgaactagtaattgttcgtaggatttaaaccgctattcgttttcgcgactatgtttttctgaagaatcaaactgcattttctcgccgaattttcccaaccgttgatcacgaattttatcaacaagcgctactatttcagtgtctccggaatgacaggctcgatgcacctcggcagaaacagtcaatagattctgctcatagtcggttccgttttgtgaaacgtaaattaaatgatggatggccatttcaccgttactcacgggaaggcgtatgccatgatgattgtattgagccagatctgccctacttatttgacagaagaactgatcacggcacgcaattcgataaggcaggctcgccatatggcgtttcgtaaaagtggtttttgaataattgcgagagcagctatccttgcaaaatgaacgccgtcccttcggcaaacgttgaccacaccatttacagcttgtcagattttttcgtaaatcacattgattgaaacctaaagcctcgccgaattgccgttcatactcggctaggctcaaccagcttcgttgatagccaaagtccttttgacgtaactgacttccctttcctatatagagatgcttttccggtaaggcatgaacaagtccggccaaagctgctttttcctgatttgttgcctgttttctattagaaagcttatgcagctcttgaccatcgaaggcataaattccgcggcagcgaaagcaaatacataatgcttcctgtgaatcatccttcagcaaaatttctagctttcgttgacaagttggacaattagcgcccaccattttaacacgtttgtaagacataaaaactccctttataattcgtttttttcgccgcctcgccatcaaagaaagctatcatatttaccggcaaacaacgcttggcgctctgaaaaaactaagttctttacaaagcttgaagaaacctgccccacccaaacactcattaacggtaaaagtcgaatggcttttaaataaatcttgacttcctgcctaagcctaacacctttggcagtgctgtgacaagctattatccatctttaaccaactaaaaagactgtctcaaacgaacagccttttatacaaaataaatttgattcccctcagtttgactactttttctacgaatcgaggcggcatggtattttttgatactgtctgtatcttccaaaataattaccttttctttaatcggactcatagagccactgctgattttatccacaagctcattataactagtatttgaaatagttactgaaggatgaaactcactatgctcctctgttacaattcgaacagctctgcggttaacttcatcttctttcttcgtccaataatatccacataaaatcgaatgaatctccttgacctcatagcagagccaattttcttcctccaaaagacgtaccacattgatataaacggccttttcagctgtcaaaaaaataaacttcgcatcactaggaccaaacagttcccataatcttgaagtagtaggacttttgacaggcgttgctacccagatattgatgctcttttcatgaccagcccaaaaaatcggatccttttcatcaaataaaccagcaatcctcgcaacaagcatttccattagaaacttatcctttttatacgttagctcttcgccttcagagtaatagcactgcttcagttctcgcaaaatagtttcttcattcgacatgggtacccctccctgtttttctaacactttcatccctccatacatttttcattagctttgctttcttcaattaaatgatgtcgcaatcttactagccatacagtccaaaatatctataatttttaacttaaataaagtataaaagtaatagatagcgtcttatcagtaaacaattcttcttaatcaaacaaaatagtcattttccatttttaagattttcttagtaattaatcactagttccctaagaaaaacgggattatccaaactgataatcccgctcactatcctattcttcaactaccttaaatctttgtcttggtcactaacagtttacgaaaattaaaaacacttaaaataatattcccaaaaacacatgcgctggtgactaggaatactgctggatagcccatcgcatgggctacagtcgagcctagcattggcccgatgacctgaccaaaattgttaaacatttgattgtagctgaaaatacgactaactccttctggtgggctgattttgctgataagagtattgattgaaggcatcaacgcgccggttgaaaatcctaggaagaaacgtaaaacaccaagttggaaaggtgttttaacaaaagccattggaataaagcaaagtaaagataagactagacctgccaacaaaactttgtgattcccgattttatctccgactttacccaacgttggtgaagaagcaattgctgaaacgccagcgattgaaacaataaacccactgataactagagcgttactgctggagccgctcaggtcccgaatatacagcgtcaagatcggactaatgctagtagctccgacctgcaaaatcagggaactgataaataggccaatcagaatcggcatataattaattcgtttgcgcaattccgccatactgatgacatcttccttttcgataggttggaaattttctttcaccataaaaaccgtcaagaaggtacaaatcagcaaaataactccggtaataatgaagacattccgtaatccgaaccattgcgccaacattccgccaatcaaaggaccaattaaatttccagcaactccgcctgtcgcaagtgttcccaatgcccagccacttctttgacgcgggacctgagaagcgatcatcgctgtcgcgttaggggcataaccagataagacaccggtcataaaacgcataatcagtaaccaataaacattcggcacaaaagccagcgagcccattgtgagagtcattccagctgccgcacgaatcatcattaagcgccgccctttccgatccgccagatttccccaaatcggagaaacaattgccgccgcaaaggctgttaccgagatcgccaatccagaaaacaactcgacttgacttttcggtgttcccagttgttcaatgtagactggtaaaaagggcataaccaaactgaaactggcaccagtaaaaaaacaaccgatccatgaaatcaaaagatttcgtcgccaattgattgccatcttttttaatcccctttctctacattttctatgcctatactatagcagaatcaccggaaaaagacttttttctgccctcagggactttgataattttctaatattttctgattatttaggcgctacggttgcgttttctaatggatgtgctagactaaagcaaaatcggaatgctgcttttttcttgcttaagcaagattgccagatgggtattatgtactgagaattcgctctgcctttctcagaaaaataaataataaatacaaagtaggagtttttttatgaaaaaattgatagcgattgatttagatggtacaaccctaaatcaagattctataattactgataagacagcaaaaactctgcgccgagcgattgaagatggtcactcagttgtgatcgctaccggacgtccttaccgcatgagtaaaaacttttatcagcaattacaattaactacgccgatgattaattttaacggcgcccttgttcatcttcctgggaagaaatgggcagatgaacaggaaacttctgttaatcggaagattgttttcgatgtaatgtcggaaaagaaaaacttgaagctagatttcatcgccgctgaaaaccgcgagaccttctttatcgatgatttaaatttcttcgatcagcatttcttcgccagtgattttgcaacaaatgataatttgttaacgattaatactttacgaacaaatccaacgtctgttctattacgcagccaacctgaaaatgtcggcagtgtttccgaggaattaaaacagcaatttggacatgaagttgaagtcaatacttggggcggtccaaatccgatgttggaagtcgtagctaaagggattcaaaaagctcatggacttaaacgggtgattaatagtcttaacgtgcagcaagaagatatcttagcatttggcgatgaacacaacgatgtggacatgttaaaatttgccggctggggtgtttccatggtaaacgggacagatcaattaaaatctgtcgcggatgatatcacggaaaagccaaatagtgaagacggtatggccgattacttaacaaaatatctagacctataaaaaagcattttcgtgaaatcgggcatgaatatacccgctgtaaagcgattcattcatgtgaaaattttatactttccttataaaaattgagggggaaatcagatgattttccgcctcaatttttttgtatggtttgaaaacataaaaaagaaattgacctttaataagccaatttcatttcagactgaatttctatttattttaccacggtatattcatcaattgttttgccatccttgtccttgaagacgagccagccattcgttccggcataataaagaaagataccgacttcattcacactcttaaagattatatcctctgttgttgtatagttagagattttatcggcataatccgctctcaatttttcagttaagcgtgcactaaatcccaccgaaccatctttgttcaaaggcatttcctgtgttaatttcgcaccagccaacagccgcatttcattgcgcttttgccagataacttccccttttgcattattataatcaatataaaatggaatttcgttgacttgcttattccagcgatgctgagcctttgctggtttagccttgacttttttattctcaaagccaaaggtagttaatagctcgaaaagtcgttcctgatgtcttgctacaataggatagcggttcacggcaattttttgctcctcaaataacccggccgttttcagcgcgtttttttgccaaacctccagcatttgttgagctaattcacggccttcaatatcccacggaacactgatcgttaccagactgtccgcttccttcaggattttttggtcaatcgtctgaccataatccaccgactgcgcttcacggcctttgaaatacagtacaagctgatccttagtcaaggcaggcacctttttcaagttgcgaaaaatcatcatcgtaccctcttcatcaaactggatgctggttgtatcatgatcaatctccactattaatttcatcatgggatttccctcaaatcttttttctttagcatagtaaaaaagtttgatcgagtcgagtgataggcctcagcgagtcaaagaaaatccctgtctaaattttgataaaaatggtacagaacattttactcaatgatccacctcataccaacgttggattttttgatgagctgaacacaatgattactctcgtttacgaattcgctcgagtaaccgctttcgttttttcttaggttttgcaggtggagattccttgttcaccgcagcgacgatcgcttcctgtggtgcctcttgcgtgcgttttccggtgacaatcagcttcgctgggacggattgatcgtctgcctcgatagtcaatggttcgattcccgcaggaaaacacgcattgatcagcatgaatgcttgactctcattcaaatcccacgaatggtagccacttggcagctcaattgtttggacgaagcgattcggctgcggccattcttctgtaatgattaaatcctccggaatccgaatcgtttccggaacttctcgattattatcaggtgtcttcgcctgttttattggttcttccattgtttggacagctgctgtttggtccgtttgagactgtgctgattttttggcagcttttccatcattaaaaatggttctttctgtttttttgatgattttggcatggcggacttcctgaaataattcaacgccatttttttcaaatagttttagtttcgtcaattttgttagtgaagctttaatctcttctgctgatttggataaatcaacatcctttatgcgcagtcgatgggatttgccatcgcttttgccgaattctgctgctaatgtataggttgtttgcatatttttagtcctttctagtttcttttatctcactattttctccattttctccgcaggtcctcgtcatgagccgaccaatcctgctaaaggttctttaataaattgtgtaaacaaggtcttcagcttttccacaacataggtctttgctggaaacaatttgatttctaataagcgccattccttcttctcgaagtattctgtaaaaaacagatagtagcggcgcaatgaacgattcgaacgtgtccgcataaaaatgtgacgcacaagatcggctagtacaaaagcgaaatccgcctctgttaattcttctcgtacttgaagcgctatcaaacattcgagcgcgccatcgccatcatttgtgtcacgataatactgactaatacgtttttctaaattcttacgtgttaaagtgaatagttgggactcacttaagccataatttttcattgatttatctcctttttcaaaataatacttgtaactccttttttaacccactggtgacacccactcaccaaccagaaacattacttgtccacccttgaggaaaccataagcctttttctgagttacttcaacatcaatttttttatattttttaaaaaataattagggtttaagtggaaaaactgaattttccgtcataaattacaattatttcagcatttaaaaaaaccttttgaccatttttagtagacgtaaataacgaaaaaatatgttttcttaattagaggaaagtataaatccctcacatgaaggaataataggtatattcatgaccgactgcacgaatgaacttttctacacaagctatgcattgagttactgctaaacgccgttaagcagaactagcatgtcgacaataagcaaaaatacttcaagattttaaaagctgttcttaataaaagccccaaaacaaagagctgatccaaaaatctcttagacttttggatcagctcctgttcatgaataaaaagcaactcatacgcagagttagccgaaataaaccgaaaattcataaaaatttgagaagcacaaagtaggttccttcaacctcgattcctatgttattgattttcttggcaacttgcgaaatttctttcttaactttttgacactgagcacttatgaatcagcattttctatttactcaataatcttttttactttaaagggttcggtccgttctgaaggttcttcttgatccgctaaatcaaacaagatcagcgcttcctttccctcaccctccacaatcactaatttgcctaatgggtcacggttatccttgacgatctgagcttctttcatcaattcttttgggtcacgttttgaagcgatcgcgttgcccaaattaaagaatacagtctcttccatctttattcacctctagtcgtagcttttataatgttaagcgatcaattctcttcacttttaaaaaataaaatttgcttatccttagcataacagaaccagcagtgaacattgaataattgaaaactttagtcctcttacatcgatttcttaaggtaaaaaaacatgacacttattatctgtgttttaagctgaataattcttttaaaaggtccttattcattcttaataaatagaaaatctatctaacttttctcgatctattgttgctatcgcttaatctattaagtgataatctcttgtctgtctcgtcggaaaatatttttttcgtttcaaaattttaaaattattgataacaatccttcatttaatttatggtatcgttttcttagtcatcgaatgatgtaaaggaggatattggccgtggcagtaagaattactgaagaatatttgattaaaaagctgaccaaatttgtcgaacagcatcaccgaacaccaaccgttaaggaatttggctatcaaaccccgataagaacaatgtttaaaaattatacaactttcctagaaagtcagggactcggcaaaaaacaagtaatcgagtattatacaaaaatcgaaatagcagaaaagctccatgcttttgtgagatcgcatcagcgtgctcccaaagcaagtgagttcggctatcgctatgccattaaaaattattttgattcctattttgattttattaaagcccatggatatgagtcgttgtatgacaaatccctagaactgaaacctagagctaaaccaaaaagtaagccaaaaaaatcgagaaaaacaaaacctagacagcctatgacaatagacatggtgatcaacgaattgcatttatttgcaaaggagcatgggcgaacaccgatttcaacagaattggggcatatgcatattatcaacaaatactttggaacctacaataactttcttcgcagccaaggctacccgctgaatactcctggtaaaaacaagccgctcacaaaagatggattgataaaaaagctgaatgactttatttcaataaatgatcgtgtcccgacacgcaaggaattcggtcaaatcaatcaaatcaaaaaaatctatggctcatttgacgcctttattagagcgaacgggtatgaaccacttccttctcgcagagctaaaaaaagttagtatgaccaagtttttcattgtatttacctaacaactgttactttaaaaaggaaaagtagcgaaagcaagcaaaattgactttttatcaaatgcgaaaactcattttggatagtttaagccccatttaagcttttttccttatagtctactcaaccctaataaacttttcattttgctagctgctttagttaccgaagcagctagcctctttttgttttaacagcaaaaaagagttgctcagcctaagctaaacaactctaaacaggttgataaataaggaaggtacgggacttgaacccgtgcaccacattactgcggctcgccggatttcgagtccggtgcattaccactctgccaaccttccgcaacatttatcttacctttttttgcttaaatgtcaagatattataaactatccaaaactgaagtatcttcatcttccaagatgttattaagggtacgattgatcaaatgaacgatctcatcttgtgtcggtgagataatacccgatgacatcaatgtcgcgatacctgtaacgcaaatccaaattcctacatgtaacgcgttgatacgtttttcagataactggctgtatttcggatgctctaaaattaattggtggaagtaattataagagaagtcgtgcattttctttccgccaccatactcttgtacatataatgcattgtatagattactttgttctttcgcaaaataaacatagctcaatcctaggtcaatgatcgtatcacctgtgcgaacttctgggaaaatatcgtaatataggtgattgcaaatttcatctaacaaagtgttcttaagatcactcatgtttttaaattctaaatagattggttgcgtactgattcccatcttcttggcaatgtttcgtgcggtaaatccagaaaaaccttcattttcgacaacttcataggcagcctttagaatctggtccttggtgtaaacttttcttctcattgtaattcctcccagaatgttattatttttcccgtcattttattttaatcaaaaactgattagttttgcaacccctatgtaggatgttatctaaatttacagaaacttttttctaaaatgtggtgaacttatgcggattttttcttacaaaggcagtgtaaacgtttcattatttatgcaatatttaacttatttcattaaaaaacaaaagtgtcgttatacattagaatacatttttgtttctttaaagtaaaaatcgtagctcaaaaaaaaagtttgctgttactttattatactttctctaaggttttctgacaatccttattctttttcttgtctaatttattcttattctctactatagtatagaatagtaaaggtggttagcttgatggaacagcaaaattatgcgcaacttgttttaaatacctgcttaaaggccgggaaaattatgatggaatctgggtcagaggtctatcgggtggaagatacaatgaaacgaatcgccctgaacgcggggcttgatgatatacaaacctacgtaacagcaacagggctgatcgttggcttcccatcagaacagaatagccaggtgattcaaatcacacctcagtcgatcaatttggaaaaagtgaccgcagtcaatcaaggctcccgccaattcgctgatggcgagctttctctaccagaattttatcattatctagaagaagtcgatcaggacacacccgactttccttatatttggaaaattatttcggctggtatcgtcagcagtaccttgatgatcatcttaaatggtacttggtttgattttattccgactttcattatcggaatgattggttttggtgttcacacgttttttgggaataaattgcagatgaaatttctgaatgattttgcggcggcgctaatcattggctgtttggctttattgacagtctcaacctcgtttgctcgtgacgtaaatagtttaattatcggctccattatgcctcttgttccaggtttagctatcacgaatgcttttcgtgacattatggcgggccacttaatcagtggtgtcgctcgtggaacagaagctttatttatcgctggtgcgatcggcggcgggattattgtcgcatttaacttcttttaacgaataaatttagttggaggtcactcatgaattttattgtcaattttctatttagtatgtttagcacaatcgcctttagcgtcataaccaatattcctcggcgagcttttttagcgtgtggtgtcacgggagctgcgggctggatgactttttggatcttacaaacgtattttcatcaaaatatcggtatctccaattttttaggtgccttaatgatcggtttgattagcattctcttctctaagatcatgcatatgcctgtgattgtattcaacgtccccagcttggttccattagttcctggaggcccagcttacatggctgtccgccatatgatgaatcaggaatttaccgaatcaatggaaaaagtggttactgtactcgtcacagctggtgcaattgcaatcggctttatgttcacgaatgtaatcgaacgagccctaaaaaggacccgttctaatttacgaatgagataaacgtgtataaaacagaaatttctttttctgttttatttgtttaaccgctaatgttgtaagcgcaaccaataaatatctaaaaatattttaagtttcgcacgaaatttacaaattactacctcagacctatgcattttgtgaatttatcctttatacttcattttagaaagacaaaggagttgagtcagatgagtgttgttcaatctaggaagctattaaatattatttcgttgatgggaattgctgtaaccattagtttatcaatctacttctatcgcttaggagtatttgatgatatgaattcattgcagcagctcgttggacaatccccgatcgctggcccgctcatttttgttttgattcaaattattcaagtagtcatcccgatcattccaggtggaatcagccttgcagcaggagtgttgatttttggaccgtattggggattcgtttataattatgtcggtatcgtaattggctcattgattcttttcctaatgggacgacagtatggcaagccatttattatgcatctcgtcagtgataaggtttatcagaaatacaaccattggcttgatgatccgcgttttgataaattgttcaccttagcgattctcttccctgttgcaccagatgatgccttatgtttaatggccagtctaaccaatatgtcctttaaaaaatacagcgcgatcatctttttagctaaaccggcttcaatctttttatacagcttggccttattacaaggtggcgccttattagaaaaattactcctccactaattcgcgttagtggtttttttacagtcttgtaggtatcctttgtgtaatgctcttcagacacttaaatacacatttaattgacaaataagctgcgagttacgtttttcgcagcttatttgtcattcgatataagacatttacaaaatgatctgtattagagacgcagcttccttattttcgaatgaaggaccattccattttcgcgaatttcatgaaataatcaaactttgaatcgcagacttgtgataccctaaataaaaagcacgatttattttagataaatcattcactgttagaattgtaggaggaataatgaattactttcgacaacaaataacgcatttttttaatacgttttccatatataactttatcatgcttgtctttggtcttccttttttatcagagggactctttttgttttttcgacaaagctttctaaataatctgtatcatcctttgtatttgttactgtttgcggctctgatctttctatacggaaactttttcagccaggtacagtcaaatgaaaaagggtttcagaacttttctttaaaggcagcatttgttagctttgcctattggctacttttatctccaatttttttctttcgcttttaccaactattgttagcttggcagccgcttccagctagaatgctttcttttatttttctttatcgttggaaaatactgccggtgattattttcctgtacttgattgttctttattttttatatcggatgatattagtgccaaaatatctaaagcaaggaaaaagtataaaggaaagtcggaagcttagctggcaaaaaacggaaaataaattgggaaaacagctgctgctcttcgtcctaattccattcgcctttttaactgtcagtcttttgatggaaatcggcgttatttggctctcgcaattcttgatcagacaaactagcgcaatgatctttttggtcatctatcgtgtattacaaaacgtatggtggggccttttctttctctacttgactgcatcggataaaaagccggtcattgatgactctacaacaaagggaacaatcgtctggctgggcttgacaattcttgtttgtcttggcttatactcgctgcattatgctcatgcctttcaaatagaagatgcaaatgaacccttcacaatctcacatcgaggggttactaaccgcaatggtgtccaaaattcaatcgcagctctgaaaagaaccagcctaagagatcgaccagattatatagagatggacgttcaagaaactgcagatcaccaattagtcgtgatgcacgatgaaaatttgaaggatttggctgataaaaatttacgcattgatgaaacaagttgggatgaattaaaaaaagtcacactggaggataacggctacactagtaaaatcccattatttgcggattatctcgcagaagcaaaccgtttaaaccaaaaattactgattgagcttaaggtcactaacaagactaaaagtacaatcgttcaacaattattaccattaaaagagcagctagccaatcatcaactacaaagtatggacctagacagcgccaataaaatgaaacaactttttccaacaatgaaggttggttatatcttgcctttagatctgatcggggctccaaaaacctcactggatttcatgaatatcgaagcacgaactgccaacaatgatttgattcaagttttgcaaaaacgcaatcaagctgtttatgtttggccggtcaattcaaatcggcaaatggccgtctatcgttgtcagaacgtgacaggtatcttgacagatgatctaagtgtcttttcggttgactcaaaccgtatcagtataaagacagcaagtattctacaatttgactaaaataaaaatcgtaaacagtcctctattgaaggttgtttacgatttttattatcgctctaatagacgttcgtaggtgaagccagtcatggaaaatctgagtagcagcagggcaatcaacagtaaaataagaccaattgaaatcactacccatccgccaaaaacgagaataccagtaaattggccaataagaagcaaagctatcggcatgatcaaaaaggccgctttctgttgtgattcttcgattgtcgtagattttgctgaacctttgacaattaagacaatcgagataatggtgattgccggtacaatgagaagcatcacccacagccaattaagacttaaaggaagcatcatccctgtaataaaatacagctctgcctcgatcacgatgacagttaaaataaacgaaacataggtcacaaagattgctacaaaaaacgaggcatagactttcgcctgaaaaatttcacgaatcgataagggagaataaagcaatgtctccagtgttcgtttctccttttcgcctacaaaagaacttgccgccatgacactcgctgtcataatcgggatgattaaaaagaaaatcggaatgacattattgatcattaaagacaacaagtcgcgaatcaactgttcttgatccagtttttgaaaatctggtaaaatacgagccatttcagtaaatgaagaagaatccgttggacttagtaaaaccgttagcagcataatcgttggaaaaactactgaaaagatcaacggaagaattgtcagcacagaaaagtagcgtttattttcagtaattcctcttacatccttgaccataatcgctttttgccgattattaaacatgcgtctctcctccttccaataaagcaaaatagatttcctctaacgaaaaatcctttggcgttacttgcgcgatattgccgccctgtttgacaatttctctcaccagttgagggatctctgccttttcctggatcactaattcataaatattatctttgatccgttcgctcttgagcaaaggcggcatgaagtctgtctcgatcgttactttatagctgttgaaggtacgctttcgtaattctggtagactgcctaatgctagaagctggcctttgtccatcagaccatattcatgacaaatttcttgggcgtatcttaattgatgtgtacaaaggaaaatcgtcgtcctctcttctcttgaaagctctagcagcaattcattaaccttctttgtactttcaggatcaagtccgctggtgggctcatccaaaaaaagcacacttgggcgatgaatcaaggtacgtgctaaggagagtctttgacgcatcccggtagaatagctctttaatgttacttgagccgcatctgaaagctctagcttttctagcaattgcattcctcttgcttgactttccgattttgtcagaccgaaaagctgcccaaagaaaatcagattatcaataccagtcaaatgatcatacatgcctgcatgttccgttaagatgcctgtggattgatgaagcttttccgcttcgctaactggattaagccctaaaacgcgaatctctccaccagtcggatctaagatgccatttaataatttgactgtcgttgtctttccagctccattcgggcctaagaacccaaaaatcgtcccttgaggaaccgctagactaatgttgtctaaggccttcttcccatctgaatagactttttctaattgtttaatttcgattgcctgcatttgtgatccctctctcgtatcaagcggtgacattcatccttaccctcccgctatatcttctcttcaacttctattgtatttcttctaacttaaaggttcaatggactgtttgttaactttaaatcggtaaaatcaactaatacgatacctaactttttaaacatgaaattaaaaaaacgcttacgtctcaccgacagtttgatagagctcctcgattattcttaatagctaaaagtagcaaggaacaaaaaagattcgaacctcttttttgaagggtccgaatctaattcctgtcaaaataaatatttcacatgcataactataaagttacgcagtacactcaacttcgatacatgcgtgtacatcttcgtattttactaataaacgattctgcaattcgataactgtcgcgcggtcagaaggtgcgcaacgtacaacattgatcaacactgtattattgtaaagttgctcaacaacaccaacaacttcatttttgattccaattgctttacactcgtaagcaagtccaatttcaatagtttctgtaatttccataataaatccccctttaatactacgtttttataataacataattattaaaaattgaaaacgttttttataagtttttttgcttttatatcaagggtaattcgacaattgttagaaaattcgtaaaacaccaacataaacaaccttggttatttttaatctcctattcattttttatttatctttaattgtttaaaaccggtttctttattctttcattatgctttttatcattaattttgattagctatgtattacttttattcacccgaaaaaaagagccctcgtcaaacgagcgctcttttcttgattttatagacgattattcaattcttttgctaaatcttcaaatcctggttttccaagtagggcaaacatatttttcttataagcttccacacctggttgattaaatgggttaacccctaataaatagccagagataccaacagcgatttcgaagaagtacatagcgtaacctaaagtataagcatccattgttgggatgtttaatacaaagttaggaacaccgccgtctgtgtgggctaataatgtgccttgataagctttagagttaacaaagtcaacatctttaccttctaagtagcctaagccatctaaatcagattcttgtgaaggaatcgccacagatttacgaggtttttccactttcacgatcgtttcgaagatattacgacgaccttcttggatgtattgtccaaatgaatgcaagtcagttgagaagttcgcacttgatgggtaaatacctttcaagtcttttccttctgattcgccgtataattgtttccaccattcgttgaaatattgcatacctggttcatagttgactaagatttcagtcactttacctttgcggtatagaatattacgaagagcagcatattgatatgcttcattttcgtctaggttttcgcttgaataagcttcgcgagcatctgctgcaccttgcatcaatgcatcaatatctgctccactagctgcgattggtagtagaccaactgctgtaagcactgagaaacgtccaccaacatcatcaggaataacaaaagtttcccaaccagctgcatcagcttctacttttactgctccgcgagctttatcagttgtagcatagatacgtttgttcgcttcttcttcaccatattttttgatcaataattctttgaagacacggaatgcgattgctggctctgttgttgttcctgatttagaaattacgttaacagaaaaatcacgatcaccgatcacttcgatcaagtcagcgatgtacgttgagctgattgaatttcccgcaaaaaatacttgcggcgctttacgatcttccttatccaatacattgaaaaagctttggtgcaagaattcaattgctgcacgtgctccaaggtatgaaccgccgattccgataactactaatacatcagaatcagatttgattttttcagctgcttttttgatgcgcgcaaattcatctttgtcatagtttactggaagatctatccagcctaggaagtcatttcctgcgccagtaccttcgcgtaattctttgtgagctagagctacttcagatttgatgtactccatttcatgttcgctcacgaatggtgctactttcgaataatcgaaatgaatgtgtgccattgtttttcctccttgaaaatcacttcataacaatctatactttacgtttcttttaccgatttttcaagcgtaaaccattaaaatttaaacagttccttgtgccatcatcgcagcagcaactttctcaaacccagcaatgttcgcacctgccgcgaaattatctttatccgcatacttcgcagccgtatcacgacaagtttcatagatatttttcatgatgtcatcgagtttgctatcgacttcctctttggtccaagacaaacgttgagagttttgactcatttctaatgcagatacagctacaccgccagcatttgctgcttttcctggtccataaagtacgccattttcatgatacagtttaaccgcgccatttgtgctcggcatatttgcaccttctgctaccacttttactccgtttttaactaagagctccgcttttttatcgtcaatctcattttgtgttgcacaaggcaaagcaatgtctgcttctgtctcaagctcccaaacagaaccttcgaaatactcagcggttgaagattctttggcatattctgttaagcgggcgcgacgaacctctttaatttccttcaatagttcgacatcaattccgtttttatcataaatatagccatttgaatccgaacaagtaagtgctgttgcccctaattcttgcgccttttcaatcgcatagatagctacatttccgctacctgagacaatcactttttttccatcgaaggaatccttacgatcttctaataaatgtttcacgaagtaaactgcaccatagccagtcgcttccgttcgaccaagactaccgttaaagcctaaaggtttacccgtcagtacacccatatcatattcacgcagacgtttatattgtccgaataggtatccgatctcgcgaccgccgacaccgatatcgcctgctggcacgtctaagtttggaccaatatgttttgataattctgtcatgaagctttggcaataacgcattacttcagaatcagatttgcccttcggatcaaaatctgatccacctttgccgccgccaattggaagaccggtcaagctatttttaaagatttgctcgaatcctaaaaacttcaagatacttaagttcacacttggatggaaacgcagaccacctttatatgggccaatcgccgagttgaactgaacacggtaaccgcgattcacttgccaattgcccttatcatcttgccaaggcactcggaattgaaccattcgctctggttcaatgatcatgcctagaatgtttttttcaacatactctggatgctcttctagaaaaggaatcacggtaggtaaaaattcttccaccgcctgtaaaaattcttcttgattcggatcttttgcctctaagttcttttgaatctgttcaacatattctcttacttccatcaaattcctcctcacatttaatactcatagtttacatcattttctaatggaagtgaaaaaaaattcatgatacgcggcaaattgactgaaaattgttcgtatttaaagtatgattatacaagcaaaaacaacaaatcaattaaagataggaattaattaaaatgagtgaaaaatttgatgtaatcgtaattggtggcggtcccgctgggatgatggcagcaattacagctgcgatgaatggcgctaaagtcgccctatttgagaaaaataaacgacttggcaagaaattgcttatgactggcggcggtcgctgcaacgtgacgaataatcgtccagtagaggatttgatcactcatattcccggaaacggccgttttttatatagtacgttttcgcaatttgataaccaagacgtcatgaccttctttaacgaacgcggagttgcgttaaaagaagaggatcacggaagaatttttccagtctcagataaatcggctacgatcgtcaatactttaaaggaggagctagaaaatttaaacgttgagctgcattttaaagaatcggttgaacaaataattactaacggctcaaccattcaaggcgttcgcacctcggagggggattattctgcaaaaagtatcatcgttacgactggcggaatcacctatccctccactggatcgcagggcgatggctaccgttttgccaaaagcgttggtcatcatgtgacacccctctatccaacagaatcaccgatttttttaactgatgattttgtttcagctaaaacattgcagggcttgtctctgcaggacgtaaaattatctgttgttgacgagaaaagtaaatcaattgcgagccatgagatggacttgctctttacccattttgggatttcaggacctgccgcattgcgttgctcaagctttgttaatcaattgttgcgaacccaacaaacagtgaccctgacacttgattgttttcctggaaaatcaaacagtgaactacttgaagaaatcagcgagcgttcggcagcttccaccaaacaattgaaaaacgccttagccggtttcttacctgagcgtctgttgctctttcttttagaaaaaatcggtattagcgaattgtcttacaaccaaacatcaaaagaacaattgaaccgctttgtttcctattgtaaagactggtcaatgactgcaaacaaaacatttggtttagaaaaatccttcgtcactggtggtggcgttgagcttaaggaaatcaaccccaaagaattagccagcaaaaaaatccccggcttgtattttgccggggaggttctagatgtaaatggctatacaggtggttacaatatcaccaccgctttttgtacagggtatgttgccggaacacatgccgcttataacgcctttgcttaatgcgtcagctccgcaaattgtcctcgcgtcagttctaagatggccgcgggggcaatttccatttgcagacctcttctaccagccgaaattgcgatttgttcaaaattttcagccgaagcatcgacgaaggttggaaaaagctttttcattcctattggcgaacagccgccgcgtatgtagcctgtcgtagcctctaaatctcgcaaatgcagcatttcaacttttttgttgctgctgaccttcgctatcttcttcagatccaattcatgatcactaggaatcactgctacgactggacccgttttgtttccaactgcaacgagggttttaaaaattctcgcaggttcaatttcaacctgttcagaaacgtggcccgcgcctaaatcgtcctcgctccaagcatattcatgctctttataagcgatcttcttttgttcgactaaacgaatcgcattggtcttttgaattttcttcttagccaagtcaatccctcactttatttattttctaaagtctagcaaaaaagtcattccgagacaaattggtcgttttatttggctttttttctgaatcatcctacactggatttgtaaaggaaaggatgttttcagtatgaaaagaatttcaagaggaaagtttgaaaagatgcaacaattgtccaatgatcaaggcgtcattgcggccttagcaatcgaccaacggggctctatgaaaaagatgatgcaagccgctgtaggagaagagaatttttcaatggatcaagtgtacgaattcaaagaacttgtttcccaagagttgaccaaacgtgtcagtgcgatcttactggatgaacaatatggcttcaaaggtatccaggccaaagatccaagttgcggcctgattatgtcttacgaaaaaacaggctatgatgccaatactcctggacgtttacctgaattattacctgatgaatctttagaacgcctattagaaaaaggcgcagacgctgctaaagtcttggtttactatgacccagatgaaccgcaagaaatcttggatgtcaaacatgcatttcttgagcgattaggaacagaagcgttagcggcggatattcctatttttgtggaaccgatcgtttatgacaagaaaatcactgatgatcactccccggagtttgctgaaatcaaaccgcaaaaggtaatcgacacgatcaaagaatttaccaaagataaatatcatattgatgtcttgaaagtcgaagttcctgtgttgtttaaatatgtcgaaggcttcaatcaaggggcagacccagtcgtctatacgcaagaagaggctgccgcttatttcaaagaagccggtgaagcagccactcgcccgtttatttatctaagcgctggtgtgcctgctgatgtttttcgggaagaattagaatttgctggtcaacatggtgccaactactgcggaattcttggcggtcgagctacttggcgcaacggtgtccaagtttatgccgatggcggcagggccgccctgattgattggctggatacgcagggtcgtgaaaatatcgaagaattaaatgagattttaaacaaatacgcaaaaccttggtacgaaatctacggtggtttagataatatcgaagtctttgatcttgatgttatggattagatcgtattttaaaaaaagtacaaaaggaaaagccgaatgatcttgtattatcaaattgataagacaagatcattcggctttctagctatcatttttaagttctatcttaactcattaatcatcagagtcaacttatccgcttcaatctgggcatcagaacaaacctgcccttctaaacaaccataggtcatgcaggagccatccaatgaaccgctgatttgtgaaaatttcccgagtctgcctagagaaacggacacgactggcagcgtaacaaaagtctgagccttcattacaatacccatttggcgcaagacatcagcctcgttctgtggttcaaggacgattttcgcgatatctgctccccaatgctccattaaatttaagcgaaacagaatcactgcatcctctggcgtttccttaaagttgtaataactcaaaatcacccgcacatctagggcctgcatccatttgataaacgtggtcgataattgatcgatgatagaaacctccacatcagccagatcaatcgcacgtgaagaaacagcaaattcgttaatatgacggtattggtttagagatatatcaagcagtccaccagcttctgtcgtccgtaaattaaaaatcaatggaatattcctgatctcatcccttaatgctagcaaagtcgaattcaacttatcatcatctaagacatcttcataataatccgctcgccattcgatcacttcggcaaccttcttggcttcatttgcttgctcaatgatctcctcgaaagtttttccaacaatcggcacgcagattttaggttttcccgcatcaaatcgtacctctcttacttgaatatccatcatatgcatcccatcccattttcttctatttttttatcctataaaacaatactttcaaataattgctttcttcaaaattactggctggaaaatccgcaggcaatcgatagctttcagtcaattgatacgttacgtttttattttgaaaggctgtctcgatcgcttgcttgaattttttgattggaagattcgctgcattagttgacgcaatgatcattccatcgttagtaagtatttccacactgtcttcgatcaaacgtccataatcttttgccacagaaaatgtttttttcttattacgggcaaaactaggtggatccaagacaatcaaattataacttaaacccttccttaatgcatagcgaaaatagtcaaatgtatccataacaattattttttgtttttctaaaggcaaatcgttcacttcgaattgttcttgtgttttaggcaggcttcgctgtgccagatcaacacttgtcgtttctaacgctccgccatatgcagctgccacagaaaaggctcctgtataactgaacatattcaaaactttttttcctgcagccaagccctctgtcaagcgacctctgacttccttttgatctaaaaagatccccgtcatatagccttcatctaagtacacggcataagaaacaccattctctaatactattaaaggctcctgtggtttttctcctgctaaccagcgactttccttcccttcgctcttaaaacgaattttctcaacgattcccttagcacttggaaaaactgccagcaaactatctacaatcagcttttgaaaatggtaaattgtttcgttgtaccaagatatcactaaatagtccgcgtagtaatcaatagtcacgcctccgatgccatcgccctcaccgttaaacaaacgaaaagtgttcgtcccctgatcagcaaagaatgcctggcgttgattaattgcctgctggaatttttccattagaaaagctttgttgattgggcgttgtgtttgatctaacacccaaccaaagcctttgttttgtttccctaaataaccagttgcaatatatttatgtttattatcgacaaactttacccattctagaggaattttttttatatcttgcttcaggtcgtcttgctgaattaatgggtttccctgacgaatacgtttaataccgtaattatttaattctatttccactctcatccccgctttcttctatagtatagcaaaaaaaaagcgtatatttcgcttataaagttttctttaagcctgattgctcaaaatttaataagaattgactgacttgatggaaccgagtaaactaagtaacaagtgaacattcgcattttttctgcgacagaaaggaagttactattgaaaaaactaaaagctcctacttttttgaataaacgtctcggcttttatgcgttactgacattcttattatgggcgaaaagtgtttttgcatacttatttgaatttaatttagggatcgagagtctgacacaatacttcatcctatttatcaatccaatcgcatcgacgatgttcttactgtcgattgctttatatgtgcgacggtccaaagcctcttatgccacgatgatggtcatctacgcactggcgagtttcctgctttttgccaatgtcgtttattatcgtgaatttaccgactttattaccgtaaacactttcctaggtgctggtaaagttgccagtggtttgggtgaaagtgcagtccgactattccgcccttacgacgtactatacttgattgatattgtgattttaccaattcttttatggcggaaaggcattaaaagagaagaacgacctgtacgtgctcggatggctatcgctatgactgctctttcgatcatgattttctcaggaaatcttttcctagctgaagcggatcgtcctgaactattgactcgtaccttttctcgcgactatttgatcaaatatctgggagtaaatgccttcactgtatacgatggtatccaaacctataagaccaaccaagttcgcgccgaggctagtcccaatgatttaaaagaagtcgaatcttatgtaaaagatcactatgcagctccaaatagcgactattacggtatcgctaagggacgcaacgttattacgatccatttggaaagtcttcagcaattcgtgattgactacaagctaaaggatgaaaatggtcaagagcatgaagtaacaccgttcttgaacagtattttccatagtaacagcaccttctcatttgataatttcttccaccaagtaaaagctggaaaaacctcagatgcagaaacattgatggaaaattctttatttggtttgaaccaagggtccttattctcgcaattaggcggaaagaacactttccaagcagctccaaacattttgaaacaaactgaaggctacacaagtgctgccttccacggaaactctggaagtttctggaaccgttctgaaacttataaaaatcttggctatgattatttcttcgactcttcgtattacgatgtaaacgatgaaaactcattccaatatggcttacacgataaacctttcttccagcaatctgtgaagtatttggaacgtctgcagcagccattctatacgaagtttatcgccgtttcgaaccactatccttacagtgaattcaaaaatgacgaagctggtttcccaatggctaacaccaatgatgaaaccatcaacggctactttgcgacagccaattatttagacaaagcagttgaagaatttttcaattatctgaaagcttctggcttgtatgataattcgatcatcgttatgtatggtgaccattatggtatttcaaattcaagaaactctgacttggcaccactgcttggcaagtcaaaggaaacttggtcaaactttgataacgcacaaatgcagcgtgttccttacatggtccatgttcctggtcaagataaaggcggaattaaccacacatatggcggtgaggttgatgctttacctactttgttacatcttttaggagtggatacgagcaagtatattcaattaggtcaagatctgctatcaaaagatcatgatcaaatcgtcgctttccgtgatggcgattatgtgacaccagagtatacctactacagtggaagcttatacagcaataaagatggtatggcaatcactgaaccagacgaagccttgcaaaaacaatctgaagcatggaaagaagctgtttctactcagttgagcacctcagataacatcaacaacggcgatctgcttcgcttctactcagccagcgggttgaaaccgattgacgcttcacaatttgattataaagacggtcttaaaaagatggaaaaaaccgagaataaactaggagataaatcaaccagtctgttcgatcaaaaaggaaaaaaatccacccaagaactttacaagactgaaacgtataagcaatatcaagaacaaaatcaacaataatctccaacaaagacctttcacaaaaactgtgaaaggtctttgtttgtttgcacttatttcttccgatagaattcatatttctttcaaattaggattttatacttattagtaagaggtgggaatctatggaacttttttcaacgacgctttcaactatcaaaagacatcgaattcaattttcaatatcttgggtgatctatttagtcgctctctttatcctaaccagtttagggatgttgagactcgttttgaatcagttagattcttcccatcaaatccaattatttaccagaaaagaaattgagcagttgcaacactatttttctttccgactgcttgtcagcgcgattaccctatttgccatattactagtatttttcgctattaggatacatcgccaaaaaaattcgacagcttcaatcaaacagctgatctattcaactggactagaatttattatcggtttgctgatcgcagctacttgtttaattgtattttttaccattttcgaacctgtttacgaatccattttgcaggctatttatcatcaaggtttgaatcaaataaaggagttgccaaattttgtcttgagtaatggtacaagtggaattgcctactctattcgttcttccttatcatttgagctatcctcaacgactttgctagatctatttttctgcgcccttgccaaagctgttttctcccttttcttatatttatgtgtactaatcatctccttccgtttgattagtaccaccacaaggaagaagaatgttcgctaaacacgaacattcttctttttatttgttcgcttaatgaacttattattgaaagtcgattgtttcttcattatactttaaaagtattcggtttttaccgatataatgaacttattcttaaggagcgtttaattataatggagaaattctttaaattaaaagaacaaggtaccaacatttctactgaagtgatggcagggatcacaacattcttcgccatgagttatattttattcgtaaatccaagtattttatcagcttctggaatgccctttcaggcagtgttcctagctacgatcatcgcctctgtgatcggaactttagtaatgggattattcgctaatgtcccttacgcgcaagcacctggtatgggattgaatgcatttttcacttatacagtcgttttcggactaggctattcttggcaacaagccttagcaatggtattcatttgcgggatcattaacattttaattactgtaaccaaaattcgtaaattaattattcacgcaatccccgaaagcatgcagcacgcgatcggtggcgggatcggaatcttcgttgcttatgtcggaatcaaaaatgctggactcctttcgtttagtgcagactcatctgcgattaccagcagtgtcgttgaaggcggcaaagcgactaacgttacaatcaatagcggaattgttcctgctttagcaaacttcaataatgcgccgattttattagcagtttttggtttagttctaacaaccatcctagttgttagaaatgttcgcggagcaatcctaatcggaatcgttgttacaacattattaggaatccctatgggtgttgttcaattaggagcaattgattggcatgctaattcattaagcagttcgatccaagaattaggcacaacttttggagcggcttttggttcagccggtatgggttcgcttttctctgactcttctaaattaccacaagttttaatgacgattttagcttttagtttatctgatactttcgatacgatcggaacctttattggtacaggacgtcgtactggtattttctcaaaagaagatgaaaatgcgcttgataatgattcaaaaggctttaaaacaaaaatggataaggcgttattcgcagatgcaatcgcgacttcaatcggtgcgatcttcggtacatcaaacacaacgacatatgttgaatccgcagcgggtatcggtgctggcggacgaacaggtctaacttccgttgtcgtggctattctatttgcactaagcagcttgttctctccattaattgctatcgtcccagctcaagcaacagcacctgcattgattttagttggtgtcatgatgttagcctcattcgcagacatcaattggctagatttagaagaagccgttccggccttctttgctagtgtctttatgggactatgctatagcatctcttacggaattgctgctggtttcattttctacacgatcgcgaaagtaatcaaaggtaaatccaatgaagtctctccgattctttgggtcgtagatcttttattcattttgaattttattattttagccattctttaaaagcaaataaagaagcgtaaaaccgatttggttttacgcttctttttgttcttcagtggcttctactgcttcaggtttatctggaaagacggctgtaaatgtagttcccttgtctagttcactggaaacctcaatcgttccattgtgtaaacgaaccagctcctgtacgatcgataaccctagaccagattcaccatattttgtatttttacgcgatggatcagccttatagtaacgatcccagatatttttcacctgatcctcagacattccgatgccagtatcggaaatcttaatctccgttgctttctccaattttgtgatagcaacagcgatcgttccatcattagtaaactggatcgcattttggattaaattcaccattacttgaacaaaacgatcgtaatcagcatagaccatgatcggttcctctgtttggagaattaattgatcccctgaagcttccgctttcgctgataattgagtcaataatgttgctactgcctccgttgcgttaaactcctgcaacaagatactaatttgattggttcgaatcttttcgtaatccaaattttcattaactaaacgaatcaaacgagaggtctcattttgcattagcttgatggccttctctctttgattttcagggattgcgttgtattgcatcccttctaataaaccgttgattgttgttaacggtgtccgcatctcatgtgaagcatccgccatgaactgctttcgccgttcttcttgccgttcgatttcatcctgcgattcctttaaggaaactgtcatccgattaaaatcatccgccaaatcatcaaattcgtcgcgattacgattcggcaccactacatcaaagtttcccgccgcaacctctttcgttgctgaacgcattcgattgatacgcttcacctgctgtgtcgcaaagaaatagctgacaataatcgcaataatagaagcgatgataaaggctttgaataaatcggctacaatggaattaacacttgtctcaacgttcatcgctggttggctgaccagtaagacgccaaaaaatacaccctcagtaaaaaaaggaaccattgcataagaagtcgtttgactttgccccatcacatttttagagcttgtttccttttgctgctgtccggccttcagcgccttccactgctcgtcgctgactaagtgcggattcacttttcctgatttatcagggtattgtacctctcgatccttatcaataaaaacaaaagatacgtcttgctgattcaaactcgattcagtcacaccaatggcaaattgaaaaatctcattacttgacatgccttcaaaacgaatgtctcgacttaaggacaaattatttttttccattgattgagcataacccaataactctttatagttgttatcttccaatgttttacgggtgaattgtgtaaaggatatccctaaagttagtagaatcaacagaatcaagccgccaaaagccagtaattgttgatacaggtatttcatcgaccaacctcagtgtcatcaaatttgtagccaacgccccaaacggtttgaataacctgtgcaccgaccttttcaattttttgacgtaattttttaatatgggcatcaacagttcgttcatctccgaaatattgatagtcccatactaattctaataactgttcacgagtaaatacttggcgcggctttttcgccattgtatataatagatcgaactctttgggtgtcaatccatcaattggctttccatctagataagcctcacgagttttcaaattcattttaaaatgctccgtttgaatatcaaaactatcattcgttacagcggcttctctttgtggttcagaagtcagttcactgcggcgatgcagcgccttaattcgggcaatcaaggttaatggtgaaaaaggtttcgtcacataatcatccgcacccatttctaacccaattacttggtcgctttcagaatctctagctgtcagcataataatcggaactgttttagagatttttcggatttcgcgcccaacttccattccgtccatgctaggcaaattaaggtcaagtgtaatcatgtcccacttctcgggttccgccttaaaggcgtccaaaccttcttttccatcgtatttaaattcggcttcccagccctcattcaagaaaaacatttgcatcatttccgaaacggattcattgtcttcaatcattaaaatattcatactttaaccccctggtatcatctgattctcattctaagtatactctatttcatttttttcaaccattaccttacccgtatcttcactaactatttgttttttcttcaattttttgaattctagcgcaacaaattcttcatttctcacttacttctttgctttttttataacgagatgttatactttttcttgcaacaaaaatattcattagggggacgttacggattcgacaggcatagtttgagcttgaattgcgcttcgtaggttacgtctacgtaaaaacgttacagttaaatataactgctaaaaacaacaataactcttacgctttagctgcctaaaaacagttagcgtagatcctctcggtatcgcccatgtactcgagtaagggtcctattctaagtgggatacgttacaactttccgtctgcaagttgtaaaagagcctatcagactagcaatgtccgcggcctgtcatgcggcagaggacaaagcgaagcttaaatagtatgactatgagcgtagatttttaagtgtcgatatgtttggacgcgggttcgactcccgccgtctccatactattatcttcatagaaaagccaaagtgttgatttaacagcactttggctttttactatagataaaaatgcgaaactttttgtactccgattaagaaacagtagttttatgaatgcagacagtagtgttaaattctgaaaaaagcactttatatttaaattcaaatgcattttacaccctttcctcaaagaaatccgaacattagacgtgttttttaaaataaaatccgaaaaatcatcgacactaaaaatatccaatgttatcattttttaaaacactggatatttcagagaaggcggtaaaaaatgaaagaattgtacgatgggaaaacaaaaacagtattactagatgaggaaaacaaggaagtctatttactatttaaagatagcgcaactggtgaagatggcgtctttgacccaggctcaaacactgttggcggaagtgttgaaggaaaggggaaaattggcttaattatttccaaatatttttttgaattgatggaaaaaaatggtattccgacccattatcttgacgcagacatcgacaaaggaataatgaaggttcggcagttaaccgttcctaatttagaatttgtattacgctatttcactgctggcagtatgtgtcgtcgttttaccctgccagaaggattacccttcgatccaccctatttagaagttaccttaaaagatgacgaacaaggtgatccgctaattacagatcgcttatgtcaaatgaagggtattttgaagcccgatcagtacgatgaagggctggatatcttaactagagtcggttctgttcttaaagaggcattggcggaaatgaacttgactttgattgatttcaaaattgaaattggttacgacgatgaaggaaaaatgtacgtcgtcgatgagatcactcccgatatctggcgtgtgaaggatgaagcaggcactattcccaaccaaattgattgtgcccaattaatcttagacaaaattcaataataaaaaaggtgagactcgattatgagtacctcacctttttaactaaatgttcaaatcgataaactatagatttcaaagaccgtgaacctgtatatgtttaatatatagattgtcttgaaattaagtgcaaaagtagaatatattaatacaattagacactcgttttatattgcaaatagaaattattacataccaaggaggtaaattatgtgacaccaaaagaaatactttgccaatgggtcgatgcgtttaataatgcagatgtagaaatcatttcagaattatatgatgataatgcaacaaaccatcaggttgccaatgagccagttattgggaaagaagctataaagaaaatgtttgaacaagatttttctaacgcaaaaatggtttgtatcgttgaaaacattttcgaagatggccaatgggcaattttagagtggcgtgacccattaggtttgagaggttgcggtttttttcaaatagtaaataataaaattttatttcaaagaggctactgggataagctatctttcttaaaacagcacaacttgcctattgaataaaatgaatatataccttatataaaatagtttgcaaatttcctaaaaagtacgattaagggaagtataacaacttcccttaaaaatttgttataataccaacactgtattaaaatatgaccttaaataaaatgccctttcaagacgaaaactgcttctttcttaatttaacctcttctttcaccgctcttcttcatttagagccagctgctctaaggcttcttgctcctgatcaacaaaaacaaatttcaagctattaggatagacataaacaatcaaacgctctttacacacatcggtagcagtagcagggtaaacttggccagtagtgtatttatcccgaaaaaggtcttttaaagcaacttctagtcctgtattgataaacggattcaacatttagctcgcttcctttctgcctacagactctcttacttacattatacgcgcacaatcgcaagatagttcccataatttaaaaaagttcagtttttaaactaaatggatttgatttctccaaaaaggtactgccatcggcctgattgacaaattgataagacaaccatttcttttaacattattcctccctcgacacttctctctgaacaatttgttccataagaatatcggtaaaagtcaatatatcactgacgatgtctgtgtgttcttcggataatccagttttatagactttctcttggaacaattgatgcaattttgactatgttactcccatttttcaacttttccttcttcgctttattgatttcgagcaaacttttacatctataagagaaagcgtttcgcgaaaaaaacacctcgtttaaaatgcacaatatctaaaaagaatttgtctgttggatgcatcattaaatggagttcctacctcttatctataagataaaaaaacaattttcaactaggaaaacaaaagctctcatttgtttaaagtattttcccattacataaaataagaaaaaacaatttttgagcagataaatatggtaggacatccaactatggtactgttaaacaaatcagaagggagggttttacagatgaaatatctagatattatcgcgcttattttgttgatcgttggtggaatcaactggttattagtaggtctttttgaatatgatttagttgcagcgatatctggtggaagcacagcgattctcgcaaaaatcatctatatcattgttggactatgcgctctttactgtttgaaatttatacctggaattgcgaatcgtgctgaataaaatcagtaaattatgatctgataagatcgtacaatttataatataaaaaaacagagctttctgcgtttgtgcagaaagttctgtttttttagcgaaatggattataaaagcggccgccattgacaactaataagacgattccaaccgaacacaaaataacaactaatagtaacgctaaataatcattacgttttagcggcttagccaacagccacgttcgcccctttttcttcccaaatcgacgcagctccatagcggatgaaatggtttcgattcgctctaaacttgaaaagatcaatggcatcgcgatcgttaaatttccccgtacccgcttcattagtgaagcctttttagaaagctcgtttcctcgggcctgctgcgctttagaaatcgttcgaaaatcttcttggatatctggaatgtaacgcaatgctagagaaaacgcataagcgatcttataagacccgccaacccgatgaatacttgaggcaagctcgctaggattcgtagtcagaatgaagattaaacctggcggaatggtcacaaaatacttgatcaataagttaaattcataaaaaagctgctcttgcgtcacggtgtagcgtccaatcccttcaaaaatgacatgacgcgtgccataaatcgttactccatattctggtgcaaataaataaaccgtcaacagatttagaagtgagaaaaaggcgataaatttcaccacaaacgaaatttcgcggtaactaattcgcgctgtgcgaaataaaattattgaaaaaatcgccagccctaatagaaagcgtgtatcataagaaatcatcccaaccacagagatcagcaaaaagcataaaagtttagtgaaaccgctgagttgatggatcacagttttcttcggcaaatagccgattaaattacttccctccataggctcctcccttgtcgtaccggataaaggctgatacaaaaccagtcgcatctgttaaatcattattttttgctaaatgatagagacttgtttgacgcaagctcgctgaattgacaagctctgctgaagataacactttggcgggtgtttcatcagcgatgatttctccctcttttaagaccaatgttcgttgcgtatgttcaagcattaaatgcatgtcgtgggtaatcattaaaatcgtaattccccgctgattcaatttgcgcaagaagttcatcatctcattataatgataataatcttgtcccgcagttggttcgtctaaaattaatagctccggctccaacactaaaatggcagcaatcgctacacgacgcttttgtccatgactcaacgcagaaatcggccagttacgaaactcataaagaccacaaacctttagcgtatcgaatactcgctctttgatcttgtccgcttcaattcctcgattttctaatcctaaggcaacttcttcaaagatcatattcttcgacagcatttgattactattttgcagcacgtaaccaattttgtccgcacgttctttgatgctttcataggcaattgattgatttttccataataactcccctgtttgcaatgggtagaaaccagtaatcaggttggataaagttgatttgccagcaccgttatgtccgactaaactgaccatttcaccttgataaagcgtcaaatcaatctccttaatcactagttctttgccaaaaccaaaggaaattttcttcaatgctaataatggaacctcttttattgggataggtttaaattcaccttgcgactttgccaaagcagcagaaatttctggtgaaaccaattgatcgacttgcgttagatcagaaaaatccttcaaagaaattcctgcacgcttcaacgcggtgatataaagcggctcacgaatcccgtaactggctaataaatcacttttaagtaattcagtcggtgtcatatccgcaacaatttccccttcgttcatcaaaacaacacgatcgatgggtgccgctaaaacctcttccaaacggtgctcaataatgatcgttgtaaatttttgcgattgatataactgatcaatcatttggattgcttcatagccggtctgaggatcaagattggctagcggctcatcaaatagtaggatcggtgtttcatcgatgagcacccccgccattgtcacccgctgcttttgaccaccagaaagatcctgcggccgtttttctaactgcgttaataaattagttttttccgcccaatgattgactgcttctcgcatttctgcttgttgaatcatttcattttccagagaaaaggcgatatcttctgcaacggtcaagccgacaaactgactatctgtatcttgcaataccgtaccgacatcaagagaaagatcataaattgatgattcgctaaaagtcttcccattgatcatcaaactgccggtaaaagtgcccttttcattttgcggaatgatcccattcaagcattttcccaaagtcgattttcctgagccgctgggccccatgatcaaaattttttctccctgattgatcgtcaaattgatctttttcaatgtcggttcagcttggctgtcatattgaaatgtaaaatcacgaaactcgatcattttatatcctcacgttctaagcttctttgttcaaactgccctttttcgtcttcgtttgtgcgtacgcttttaataaaataaagccaataattcctgttacgattgaattcgtgattccggcaacgacaccttgagtaaagactttacttggtgcttccgcgtagatcaagatatccccaatcggtgcgataaccacccaagtgactaaattagcaatcgtttcaccaactaaaaaggttccgatttctttcttgccgaaaatgccttgttcaattggaattcgctttgctaacaaaccgaaaaatacacctaaaattcctgaagcaacgatccaagaccaccatgctccatacgttgttaaatcacctaatgcatgaccgataaaccctgccaatccagcaacaattggcccataaacgacacctaataatgctaagaaaggatatgccgttgcaatatccgtattaggaatgcctgtaggaatcgtcacgaatcgttttaaaatgaagaaaaccgccgcaccgatcccaattgctacaatgtgttttaccgtaaatctcttattcatactttataccccttttttatttgataaatgcttaataccctaaatttttagtcaattcaatcgtccaatcgttgccagtaccaattttataaactgcggagaatgaatccaaattaatccctaatccaacatttaataatgaattaatataaagaactgcttcattcggtgccacttgagcgaaggaacgcccgaaaacaacttcatcttgataacggaccacaccttgatagtatatttttactagcaggctttgtccatattcaacttgccagtttttgaaataatccacaggaatgttcgtccacaacgagccaaatcgaatatcggtgatatcaatcgttcccgtaattttatcttgtgtttgttctggagcgatcaaggggaacgtcactaattcgctgcttggaataatcgttcctaattcagcaaaacctactttaccgctagctaatcgggcaccgttatagacatagacatctcgaccatggaatgtgtgactttcagatgagccgggcagacgttgactctcctcatcaatttgtcgaacttccttaattccgacatattgagctaaatacgtcaatgttccgttatctggcgtaattacatattgcccatccttcaactctgcgacgacactgcgacgggttgagccaacgccggggtcaaccacagatacaaaaacagttcctgctggccaataagtgaccgcctgtaataaacgatagcttgcatcatgaatgttataaggttcaatctcatgtgttaaattattgatgtttagagtcggttcaacttgataagctactccatacatcgcgttgactgcgccatcctgcaaaccaaaatccgtttgaactactaaaaatcctgccattattcttccaccttccaattttacacttattgttgaagttatcagtgattcaatttcctaccaagatcgtcatcccagttaaggaagaaacacaaaaaagccctcagcaaatataattgctaagggcatagactatgcgttaccacctttaatcgtaaaatcctcacagattccacctcgatcagtacccaaaatttttcttggagactgtgcctggttaacgggggcatccgtatttccttaaattttcgggaaatccgctcaaaagccattttcaagtaattgctctgcatcccctctcaccaaacaggaactctctttaacaaagatgattactttactttctttatcaacgcgtttcatcaattgctaataaaatatcagagatatttcagcttgtcaatggagaaaaaatatctgcaaagtgattcttacctatttatttcacgatttatctaaaaaaacgatagaagaatgttaagcaattagttttctcgccacacctcaatatattgtttagcggtttgagaaactaattcgtaattttcatctttgacacccttaaataggttgccgccaacaccaacaacaattgctcccgcttgcttccaggctgctatattttctaaattcactccgccagtcggcataatgttcacatgtggaagtggggcctttgctgctttaatcatttggggagtaaaattattcgcaggaaaaagttttacaatatctgcgccgcttttcattgcctgctgcatctcagtaattgtcatacaacctggcatataaggaacttgataaaaattacacatttctgccgtagcctgatcaaaacaagggctaacaataaactctgcacctgctaggatcgctaaacgagcagtaacggcatccaaaactgttcctgcaccaatcactacgctggaatcattttgatattcttctttcaattgagcaattacttgatctgcttgcggtacagaaaaagtaacttcaatccccttaatcccgccttttatgacggcgcgtgctgcctcaatggcacgtttttgagaatcttccctgacaactgccactacaccagcatgttcaattcgtgttaatcgttccatttttttcatcttgctcacctactctacattgacatgctcatgaagagcatcttcattggaagtttgatcacgctgagcaagcttcaaggttaaggcatccaaggtgatgtgcactgtctggtcaaataaacttgataataactgaacagattttactccagcaccagtctttgttgcgccaggtaccacaataactttgtcagcaagcttggctaatggagactctttggcactcgttaacacaacaatatcaagtcccattttttttgctgtttcggtatctgaaacaattcctttagtggtacctgatccggaaatagccacccaagtatctcctttttgaatcgaaggagtgatcgtttcacccattacataatcggtgtaaccgatatgcatcaaacgcatcgcaaagcccttcgcttgaaatccactgcgacccgctccaattacaaagattcgcttatttttttgaaacagtggcaaggcctgttccagttccgtttcatcaactagctccattacttgattgatttcttgtatgattgtttcgattgttttcatttgtgaacagctcccatgaattcatttactgctttcagcgggttttccgctttagtgatttttgatccgacaatgacaacttcaattaatccttgatctgctaacaaccccgcctgtgtcaaatcgattccgcctgcgatcgccaagcgtttgatttcggggaatttttggtgaaaagcttcgacacttgcagtcgcatcaaacgaatctttccgatcaactgagtgatgcaaggcatagatagcattaggaaatatctggatttttttaattttttcatccgttacttcaagtaaatcgatcatcattgttttattctgtttttcggcgacttcatagcaaacattcaaagtatcaattgaggctgcgcccatcacagttacaatgtctccaccgtgacgaaaagcttgattaaattcatacgcgccttcatcgatggtcttactgtctacaagtaaatcggtcttggtcaaaactgttcttaatttctcgatagctagattgccataatccttaactaaggaggttcccatttctaaaatgtctgttttaccatctagttgttcggctaacgcaaccgcctcttccaatgatacacggtcaattgctgcttgtaatctcatgcttccacttcctgttgttgtaaaaattcttctaattcttgcggagttggatatccatcgttatctccaggggattgaactgccatcgccccaatggcattagcacgaataaccgcttgttttaaagatttcccttcgatcaagccagtgatcaacccaactgcaaagccatcgccagcaccgacggtatctacaacttccgctactttaaaccctggtacagtaaaggaagtaccatccttttgttttacataagccccttcagttcctaacttgacgatcactgttttcgttacttctccattgttcaaatagaagtcagcaattgcttccggatcacgactgcccatcaaaatttcaccctcattgattcctggaaggacaatttcagcatgtgatgctaaatcattgatcgtttccaccatctcttcctgactcgcccaaagctgcggacgaagattaggatcaaaggttgtacggatattgttcttttctaataaatgaatcaaatagcggaaggcttcttgggcctcagctgaaatagctggaaaaattccggataagtgggccattttcacctctgaaaagtcaattttatctagtatttcttgatcaaaatgggcggcagccgaacccttgcggaagtaaaaaatacttgggtctccttgactaacgcgatcctttaattgaaaagctgtccaaaagtcagccgtttcagaaatataatctgtcccaattttattttcatgcaggcgatcaataataaactcgccaaagggatctttcccgacttgtgtaatgtattcactgctatgacctaaacgagaaacgccgacagcgacattaacctccgctcctgctaaaaatttttgaaaatgacaagcatcctttaaggatttgtcgacttcctcagatccgaacaatgcaattggctcaccaatagttaaaaactcactcatgttaattactccttttttagttattttttaacagcttactattaaaactaatttgcaactaaaattcattgatttcctttaaagtaagatataggcaacaatcaaattcaaaacagttgctgcccacgcccatggcagtcctgtcattaagaacgttttagtatccaaaccggcatattgtacagaccataaattccatgattgagtaatacaagctgagacacccatcatagatggtacgactaacagaccgtataagaaatattggtcaaacattcccgttccaactaaaattgctgcagttgcagcaccagcaccatagagcattagtgggccacggaaataagaaagcggtgcgataatcgctacgataataattaagacaagcttgctgcttggtatgacttcttgaaagacactcgtaaaacctgacattgcatgcactgctgccgattgaaacatagttaagacaaacaacataatcaataaaccagcaatatcgctaatcgcatgtttagccgtctcattcatcatcgtcacaaatttgctgtagcgtttcatattacctgtcgcagcaaaagcaatgatggtcgaaagcaaaagggctggtacagcgtcccatttagcaaaaatacttaaggctacaggcataactggcaatacatacgtccaaatcggaacttccactacctcttctttcaaatcgctttcgacaatttcaggtttgccgtttcgaattttcttcgcgttaaacaaaatgaacagtatcagaatcaccatttgcacacccatcgccacaaaaccgaagcgttggtaatgagggccccatgctactttcggaaagaacacttgaaattgtacaaacagcacattattgacatacattgcggcaccaatagcaatcgtaaaaacggaaacagcaatattttttggtaccccaatcgaaaacataattggaaacagaatgactccaaccgcaatagccgatccaactccataagagcttgtaaagattaaagcgattacaagagtgatcaaaacagtggctaagacaggacttttctttccgactttttcagtgcgacgactaatacttcctgcgattccagtatcaactaacactcgtccaaaccaggaaccaaagataatatacgcagccgtttttccataatttaaaacaggctcggtaaagatttcttttacagctatgttaaacggcaccattccgatgatcgtccataagattgccattacgaagaacccaacagtcaagttaccgcccttcatcgcatagagtacaaaaataatgaaagttacggctaataatattcctgttatcgcgctacccatgttccttcacctcctaatatttgtttagctcacttaagatgcgctggtattttgaaattggttttgcatgatcttcaacaaagaaatcattttccaaatgattgaatttttggatcaaataataaccagtcagataagcagctaaagcttcttttgccgctacctccatatcttccttatctatttcaggtcgatgaatcgtttccataaaatgataagcaaatgtttctggatcgatttttgtttgttgttcagtcattagaattcactctccaataattctttggcttctaaaatttcgtcatttgcggttgtaggatactcgattgcaaccggtacatcctgaggtagtatttgtaaaactttacgccaatcaatatcaccatgatcaagtcctattgcttgtggctgtcccttttcaacttctacatcctttacatgaatatagcgaacatagtcttttaataattctgcagcttttatttcatcctcaccaacaaaccgccagttaccaaggtcataaacgtaaccaattgataaatcagtatttttaatagcattcataaaagtattgatagcactaatcgttcccgaagtttgagtttgatcattttcaattgagatagcaactccagaatcaacaagcgttttcaattctttttcatgaagttctccattaaaatcgccaatattccatttgatatgctgaacattcatttgtttagcttcaatcaaatattgttgcaacttaggattgagttctccattcacatagacctcatcaggaacactgtaaaataacttcaaatccaatcgttctgcctctgattggataacaggaatctcttttttaatatctttaaagtactctctccgaatctcaacttgggtaaaacctaaatcagatatttcctgtaataaatcgctttgtaaagcaccattagctactctatctgcataaactaaaaaattaagcacaagctttttatctctcataaaatcgcgtcctttcagttagttaaccggtttctatatttgtatagtaaaccggtttccaaaaaatgtcaacgatttcaaaattaaaaaacatctgccttacagcaaaataaataagccttgtttagtaaccggtttccaaacaaggcttatctgttaagatttattttataaaataacttcgattatactgacttccgccaacgaacagttgaaggtacgattatttcttgaacctcttctgatttcgtcgtcattttttgcaataattgctcggctacaacttcaccaatcttttttgaaggctgttccacactggtgattccaggaccgacaagttctgttaaattccaatcatcgaatccagtcacgcctactttttctggaatggcgatttcttggtgaatcaaccacgtcaagacatccatcagcattcgaccgttggaagcaaacagcaaagtctgtaaatcctcttcaagaatagttgataaactatcactgatttgctcttcctgactaatttcgatcagttggcattgctttcctgcttcctttaccacttgatcgactgtttcgtagcgtaattgtcgagtgctgacgtctttaatcggttcactgatgacaactacctgttcatagccctttgccaacgcttttaccaatacctctcttgtcgcagcacgattattggtcaacacagaggtccattgcactggatccgtttgcctatccaccaatagcagtggaatgttacgctctgaaataaatgtataatttgccgattgtcttgaagaaggctgtaaaataattccttcaacactttgatctaacagcttttccaatagttctttttcctgagtgattgagtttgccgcatccatgataatcatttgatacccgcttttttctaaaacctctccgattcccttcaaaagtaatgaagaaaacatattagaaatatccgctactacgactccaatcaaatagctatgttttgatttcaacgcttgggcctgtttgctaggccgatagtttaagcgttcaatcacctctgcgattctttcttttgtctccttcgacatattaccgtaatttttatttaaaaagcgcgagatcgttgttttcgaaacacccgcttcttcagcaacttctttaattgtaatcttcttcatcttgtcttctccaactatcttttttatcattgtagcgaatttccaagcgattggaaagacaacaacttagcttctctcctaaagcgaatccggcggttcatttccttacattctcaatgcatctttgcttttatccaaaacaagcatagtttctctatttggtcttgtaaagatcacattgtaatcttgctcacctagattggtattgggttcgaaggctaattgttctctatccaaaaaaaattgagcattgattcccggtttatttccccgcgcatcaatcctgacccacttttccaatatctcgaaataaacagcatttaacgcatgaatacaatagcgcttttcttcatcatcaaagagccgcaacttttgatagcaataacctgtaggaatacccacgtttcgcaataatcctgttagcagatttgccttggcataacaaattccgtgtccactcctcagtacctcgacagaagttttggttacctcatctgcttggatatcccaagaatgatcgatctgatctctgacatatagaaaggctctttgaatgatttctatttcatttttagtattgttaaagagcttctgacttaatcttttcagtaaagggtgagacaaacatatctctggtaaatcctgtaagtaatcttcacgcttatttgattctactctcatgtaagtcctcctcaaaattataggtttcatcaatcaataaataattacaggcatattttttacacatcgctagattttcactgttggttttaatcaaatcttccatcgtcaaatccgaatcatccagccttttttcaatggtatttgcatactttttaatatcagaaaagtgagtctcaatatagtttttcgtcataatcaaacagtaataactaatctgatccaaatattcttcagaaaaagactgtttccaattaaagggaacatatatgccttcagtgattaaattttgttcgttttcaatcgctgttttaatgatttcttttaaaatattccacagataaaatgtaagttcttcatcatccgctggagttaaatctatttcgccacttcggatcaagcccatcttcagatgatcaattgacaaataaggataatgataggtctccaataatctttgtgctaaaactgtcttacccgtatgagtcgctcccgtgatgattacaatcattttccacattcctttcattaaatcattgctgattaaaaatttgagctgatgtttctttaactttcttttatactaattgtaaaagaaaatatttaaagttttagtttcgattttttacagagtaattactagctctgaaatatattacgaggagtgttcgcatgaaaaattatcgagtagctttttttgatattgatggtaccctggccgataacaacttacctcatggtttgtcctttgaaaaacgaattcccgattctgcaaagctggctttacgcagattaaaagaaaaccagatcgaacccgtgattgcttccggtcggcattatggtactttagctgaaatggccgataaattaggcgtggacagcattatttcatccaatggaaattgtgtacattatcaaggaacaatgattcatcaaaatgtaatccctcaaccgctattagcagagctcttaaatcatttagaaaagctgaatatagaatgtttaatcgaaactcctcatgaattgtattgcttcgagacaaatcaatatataggagacccttcctctaaaaagaccttgctgaaaaaaacagatccgctcccgaaaaatgtcatccaattgatcgttccttggagtgagaaaacagagttcaaattagggatagattccccgcttatcgcagaaaaggtcgctccagttgcggctaatatccatttgaaaactgggacaaaggcagaaggaattcataaaatctgtgactcaatgaagatcacggccaaacaagcactagccttcggtgatgaagaaaatgactttaccatgtttgatgctgtagggtttcctgttgccatgggaaatgctgcgccagctctaaaagaaaaagccgcttatgtgacaactgctgtaaatgacgatggtatttggaaagcttgtgttgacttaggattgattacagaatagaaaacatccgccagaagaagattctgacggatgtttttagcgctcagtaatattttgatattcacggtcttcggaaacttccatataagcaggccgaatgattttttgaacattaatcagctcttcgatacggtgtgctgaccaaccaacgattcgcgcgatcgcaaacatcggtgtatacaattcttggggtaaatccaacatgtgataaacaaaaccactaaagaaatcaatattggcactgactcccttgtaaactttacgtctttcagaaatgatttcaggggccaaacgctccactttacgatataagttaaattcagcagaggcttcagatcccttttctgccgctaatttttccacatatcttttaaaaatttcagcccgcggatcagactcagcataaatcgcatgacccataccgtagattagtccttgtttatcaaaggcttccttatttaaaatcttttctaaataatctcgaatttcgttctcatcttcacaatcatttacgttctcttttaagtcctccatcatttgggtcaccttaatgttggccccaccatgcttaggtccctttaatgagcctaaggccgctgcgattgttgaataagtatctgtgccgctagaagtaacgactcgagttgtgaaagtcgagttgttccctccgccgtgttccatatgtaacaccaatgccatatctaatgtttgggcttcttggctggtatattttttatctggacgcagcattgtcaaaatagcctctgcagtactcaagttttcatccggacgatggatgtacatgctatcgcccttactgtagtgattgtaagcatggtaagaatagacagcaatcattggaaacgttgcgatcaacgataaactttgatctaaaacattctcaatactgatatcatccgttttatcatcgtaacatcccaatgttaggacactccgagaaatcatattcatgatattatgtgacggcgccttcataataacatcacgtacaaagttggtgggaagtgttcgtcttttgccaattaaagctttaaattcagctagttcaacttcggttggtaaagtaccaaataataacagataactcacttcttcaaagcccagacgctcttctgaaacaaagccattaaccaattcattaatatcaattccgcgataacgcaattcaccatatttggaaataaccttatcaccggacatgatttgcggatgaatcgtggagatattggtcaaaccagccaaaactcccttaccgtctagatcgcgtaatcctctttttacattatgtttcttatataaagaagcatctaaatagtcctcttttcggcatacctcggccatttggttcaaatctaacatcattatgtcctcctaaccttatttaatttaacaatcgggttaagaaacattataacaccattggcgtaaaatgaaatacttttaataatttcatttactttctttttctttattcgtataataaacccaactgattttaaacgataacgtacttaggagggatttgggattgaattggaaaaaagaactttttatcaaaaacgaacattatacatactttgatctttcggctattgtcaatacgtatcaaaaaaatatcgctgattatccattcagcattcgagtacttttagaaagcttagcacgacatcaggagctcgctgatttagagaatttgatcacctttgacgcgaaacaaccatcaggagtggtaccttttcgaccatcaagagtcgttctacaagactttacaggtgtccccgcagtggttgatctcgctgcgatgcgtgatgctgtcgtaaagcttggcggtgatccaaagctcattaacccggaaattccggtaactttagttgtagatcattctgttcaagtcgattgtgccggcacctcagaaagcttggcttacaacacggagaaagaatttgaacgaaatcacgaacgttatcaatttctaaaatgggcgcagcaagcgtttgacaatttcgaagttgttcctccagaaacaggaatcattcatcaagtcaatttggaatatttatctgatgtcattttgaagaatgatgaaaatctgctgtttcctgactcattagaagggacagattctcatacaacgatgatcaacggtctaggcgtacttggttggggtgtcggcggtattgaagctgaagctgcaatcttaggagaagcctcctattttccaacgcctgaagtaatcggggtagagctgactggcacattgaatccaggagcaacagcaacagatttagctctttacctaactgaacttttacgtaatgaaaaagttgttggtaaatttgttgagtatttcggaactggttacaaaactttaagtctttctgaccgtgcaacaattgctaatatggcgcctgaatacggtgcaacctgcggcttctgcccaatcgacgaagaaacactgaactatctacgtttaactggtcgttcagaagaacagatcgcgttagttgaagcctacgcgaaacaaaataaactcttttacgatggatctgaaacacctatctatacacgtgtgattcaattagatctatcaattgttcaatcttctgttgcaggtccaaaacgaccacaggatcggattcaattagcagaagtggcagaaaatttccaaacttctttaactaatccaagtgggcctaaaggatttggtttggattctgatgaaatagatcgcagagtaactatccaaggaacaaacaatacaattgaaactggtgatttaaccttggctgcaatcactagttgtaccaacacgagcaatccttctgtcatggtagctgctggcctactggctaaaaaggctgtatcccttggattgaaggttccagaaacaattaaaacttcgttagcgcctggctcaaaaattgtgacccaatatttagaaaaaggcaacttgttagagccgttagctgaattaggatttgatatcgttggttatggatgtacgacttgtatcggcaattctggtcctttagcagaggagattgaaacgaccttaaaagatagtgaactggtagtttcagcagttctatcagggaacagaaattttgaaggccggattcatccattaattaaggcaaattacttagcctctcctcctttagtgatcgcctacgctctagccggtacgattaaaaaggatttaacaaaagaagcattggctacagtcgctggtaaagacatttatttaaaagatttatggcctacacaagaagaagtgaatgactatatcaatgatttcttaaatccagatgatttccgtaaggcgtacaagaacgtctatcaatccaatgaacgctggaatcagatcgaaacctcagagggtgattgttacgagtgggacgatgcatcaacatacattgccaatccaccgttcttcacaaatcttggacaagaagcagacgagacaaatccattaaacaatttacgtgtcttagccaaatttggtgactctgtaacaactgaccatatttctccagccggaaatatcggccttcaatctcctgctggtaaatacttgaaagatcgcggtttatcgtataaagatttcaattcctttggttctagacgaggcaaccacgaagtaatgatgcggggaacttttggaaatattcgaattcaaaaccaattaactccggaaacaactggtgggtacacaaaactggcgacaactggtgaagagctatccatttacgatgcagcaatgcaataccaaaaagaacagattggtacattgattcttacaggaaaagactacgggatgggttcttctcgagactgggcagctaaaggaacgaatcttttaggtgtcaaagcagttttagcagaaagctacgaacgaatccatcgcagtaacctagtgatgatgggcgtgattccgtttgaataccttcctggagaaaccgctgaatcacttggtttgactggcttggaaagctacagcttcgaatttccaacggaaccggcaatcaatcaaatcattgatgtgactgccagtggtgaaaaggatatccacttccaggcaaaattgcgctttgattccgaagctgatattgcttattggaagaatcagggaattttaccgctagtgataaacaaaaaaatgcaaaaggagcaggcataatgacgaacactttgactccaattattccatatatagagggcgatggtatcggaccagaaatttggcaggcgacaaaaaaggttgttgatgcggccgtttcttctgcttactcaaatgatcgaaaaattgaatggcttgagattcttgcgggtgaaaaagcgtttaaccaaacaggtacctggcttcccgatgaaacattagaggcaatcaaacaacataaaattgctattaaaggaccgttgacaacaccaatcggggaagggttccgttctctaaatgtaaccttgcgtcaagaattagatctatacgcctgtgtaagacctgtccgctattttagtggggttccttcacctttaaaggaacctgaaaaaacggatatgacgatctttcgagaaaatacggaggacgtttatgctggaattgagtttgctaataattctgccgaggtcaaacagcttttagactttttagcagaacaattagccgttactaaagttcgttttccagacaccagttcgttagggattaaacctatctctcaagaaggcagtgagcgtttaattgcggctgctctagattacgccatccagcaaggaaaaaaacgggtcacccttgttcataagggaaatattatgaaatttactgaaggcggctttaaaaattggggttatgatttaattgaaaagaactatcctcaggcttttacgatgaatcagtacaaagaaatcactgctgaatccggtactgaaaaagcgaatgaagcattagaaaaagcgaaaaatgcagggaaaattattgtggatgacgtaattgctgataacttcctgcaacaaattctgctttatccagaaaaataccaagtagtcgcaacaactaacttgaatggtgattatatttctgatgctttagctgcacaagttggcgggatcggcatttctccaggcgcaaatatcaattacaaaacaggacatgcgatttttgaggctacccatggaaccgcacctgatattgctggtaaaggctgggctaatccttgttcattactactctccgcatcaatgatgttggatcatcttggctggtttgaggccagcgaaaaaattatggctgccattgaaaaagcgttgcagaacaatcagatgacacacgattttgcacagatgattgatatcgaagagttatctacttcagagtttgctgagtatctaatcaaaacaattgaaaaaactaattaactagtaaatcccatggaatagccttccatgggattttaagtgcgtattccaatcattaagttcttaattaataagcaaaaactatttttttgaaaaaaactaaaaaatatggctatgttattcaataattgtaaatcttatttacctaaaaaattgacacaaaaaatcactcagagatattctcggagtgattttttaaacaggacggtccgttaactaaagaaacattctttggaaacaattcctgctacttcactgtatttaattaatacttgcccatttacttggtcaatcttatctgcatccaatccgtaaaaacgttcaacgttcacaatgcatccattattttctttacgaattacttctccgatgatcggccgagcaaaatcagttttacggcattcatagctttctccaacaataatcgcttctttattcattcaaccacctcattaatgttttatactacacttatatagtagcattaagcgaagtaaaataccacattaagggtgttatttatcaaataaccatctttttagataaaaattaaaaattttagttcaaattttccagtaataatgagacgtattgttccaagtaaaattgatcaatttgatcgtacatagctatctcggaactatctaaatccaatacgcctatcaattgttcccccttcttcattggaacaacaatttctgatcgtgcggctgaatcacaagcaatataatttttgtgctccagtacattttcgacaattaatgtttggtttttctcagccgcttccccacatacacctttccccattgcgatatgaacacacgaaacatttccttgaaatgggcccaagattaattcatcgtttctaaaaaggtaataccctgcaaaaactgtctcttgtaatgtctgatttaataaggcagatgaattagccaaattagctatcaaatccgtttcaccttctaataatgctttttgttgcatcaacattaatttataagcctcttcttttgcttcttgatttttccaacccatgcggattcctcccaatttaaatacgtaataagtgtatcaatttctccagattgagtatatagagtattaataactttcggtttattctaccgtaactctttgaaattctccattgattaaaatataagtgatcacagacaaaaatagtattcaaatcattaaaagagcggcttgtcaagcgttttcacgattaattcctcgttgaaatatttcattatcgttacaatctatacggttacataaaaattcaaatactttaaactttttcttcatagtttcttatataattgaacccgaaagctgaaaaaagtgagggaatccattgattaagttgaaaaaatatacggcactaactttatgtgccttaacactaaccactaccccattaagcgcattagcagatgagtacgatcaaaaaattgctgatcaagataaaaaaatctctgatttacaacaaactgagcaatctgctgaggatcaaaaagcagcattagagcagcaagttgctgccgtggaacaagaagtgaatgctgttttaaaagaaaagacaaatgaggaaaagaaattaagcgatttaacagcaaagattgctacccttcaagaaaaaattcaaaaacgggaagaacaaatcagaaatcaagctcgcgatgttcaaacgaaacaggattctggttcaatcgttgatgcagtgatcaattctaaatcacttggtgaagcggttaaaaagacaatggctgtctctactatcttaacagcaagcaaaaacattatggaacaacaaaccaaagataaagctgagcttgaaaagcttgaaaaagaagccgaacaacgtcttcaagtgatcaacaagaaaacaacggaactaaaagccaaacaagagcaattagttcaaacaaaattggatcagcaagtgaaaattaatgaaatccaagcaagtatcgcgactgaaaaagatcaaaaagataaatttgaaaaacaaaaagaagatgccgaaaagaaacgtcaagcggctttgaaagctttagaggaacaacgcaaaaaagaagaagaagctcgtgaaaaagcacaagctgaagcagaaaaacaagcgaagaaagcggcagaagaagctcaagaagcagcagaagaagcggagaaacaggctgctgaggctgaaacagccaagcaaaaacaagaagcggaaattgctcagttagaagctcaaaaacaagaacaagaagcgaaacagcaacaggaacaggctcaaacagttaccgatgcaggtgctagtcaggtgacaaccaatccgacgacctcaacatcgaatacctctaagcctgcggctactagcagtggttgggcctctccattatcaattgggttagtcgttacaagtccatttggtccacgccaagatccaacaggcgcatctggtacacaacacgacggcattgattttgctggttctgccggcactccaatcatggcttctaaaggtggaacagtcgttgaagctggtttccattggtcagctgggaatcatgtagtgattcagcatccagatggctactactcttactacatgcacatggtttctgcaccaagtgttggtgttggttcatcagtcagtgctggtcaagtattaggcggtatgggaacaacgggtaattcaacaggcgttcatttacactttggggtttcaacagcgttatggtcaggctttgtaaaccctgcctcactattaggaatttaataaacgattcaaaaaatgcagaacaacaatcagaatatctctgatcattgttctgcattttttattttatggaaaaaggtgatgaatatgacgattgatgagattctgatttatttaaaagaagcggcatcagagaaatttaggaagaatatcatcaaactcggaattccggctgaacaaacacttggggtttcaactgctgaattacgtaagttcgctcgaaaaattccaaaagaaaaagatttcttaatgcagctatggcaaaccaattaccatgaatgtagaatacttaccgtgttagcactaaagcctaaagactgtaatgatcaagacatcaactatttaatggatggcatcatttcttgggatctctgtgatttgttgtgtaaaaatattctgattaaacaaaaagacttcgatcatttcattcaaagttggataaattctgacaaattgtatttcaaacgagcggcttttacattgattgcaagcacctcaacacatgcctcccttacaatcgctgaaataaaaaactatttagagttgattgagagctattcagatgatgaacgtttgttagtgaaaaaggccgcctcttgggctttgagagaacttggcaaaaccaatttagaagccaaagagttagcgattaatactgccgagacaatgcaaagacaaacatctaaaccacagcagtggatcgctaaggatgccctgaaagaattgaccgttttagttcaagcccctggtcgctctcgcctgatctcagcaaaatcgaaaatgggaaagaatgcgtaaaaaagacagaagcaaaatgatatgctctccctaaacaagggtagcatatcatttttttgcttctgactttttactattctgcttcttcaatatcttttgagatttcgtccaatttgatctcatttgagagataatctgcattctcggttggaaaatgttgtcggaattcggctaattccataagatcaaccgttccatctgacaacttaaagtccaatacgtgaccgccaaatttccgatcatcgctaatgaaatgtaaatggaatccagcagcagcggcaccgtgaaataatcttggtgtaaagaaaccgacaatcgttccagaaatattatcggcctcaaattctggttgattgcgcgcaatttcaacgaaacgcggatatggtttttcttgttttggcgcgacccgcacatgcatatgtttaaacttgccatttattttgacagccgcaaataaattgtggctgattttttctaaaatgtcctcttttacaacatcatcagaaacgttcattaaagtaaatcgttcatctgattcaaaattagtgactgctgcataaggtgttaactcatcaccaactaattgattgatttttcctgtttcatcagcgtggtaaatgacaccatctaggaaaatgacttcaccgttggagccttctaatgttcccaaaccaaaatcaccgtaatttgataaagtaccgattttttcggttccatccattaaatcttgcatcaaaccacccagtgttccatgctgatagatatagctttttgttttcactgtcatgagtaatccccttcttttgttttatttcacagatattcactaagaaggtctaatagaattgatcaggtaaaattgttttacctaattccttattatctgaataatcaatcggaatatcgatgattaccggcccttctgtggctagcccctcttgaatggctgtttctaattctgcttttgatgttgcacgtaatccttttgctccaaaagcctctgcatatttcacaaaatccacaggcccaaaatgtacacctgaagaacgatcgtatttcatttcttcctgaaattcaaccatgttgtagctaccatcattccaaattaagtggataattttttgcttcaagcgaacagctgtttctaattcttgcgctgagaataagaagccgccatctccggaaactgagaatatttgagtatttggacgtactagtgcagaagaaattgcccatggcaaagctacccctaatgtttgcatcccgttactgaatagcagatgacgtggttcatagctacgaaagtgacgagccatccaaatatagtgactaccgacatccacggttacagtcatttcatctgttacattttgttgcagtgtatcaatgacttctaagggatggacgcgaccttctgccgtttcacttttatgtctgccgtttgttagtttatcttgcaatgtcgataaataatgatcagcatccgttgataattggtaactatcaatcgaatcactcaatttttcaatcgttttggcgatgctgccaattaactcagcttctggctgcatgtattgatcgatttccatagggacttcatcaattactacaatacgtgcatctttctctgcattccagtttcttgcttcatactcgattgggtcatagccaattgctaggactaaatcactacgcttcagcagcatatctcctggttgattgcgaaatagtccaacgcggccaaagaaatgattctctaactctcgtgaaataattcccgccccttggaaggtttcaacgactggtaaaccagttttttcaaccaacttccgaatcgcagctgtttctttttttccggatgctcgcataccgactaataatgttggtaattttgcatcacgaattcgtttagttaagtccgcaatatcttcctctgaggccgcacctaaaatcggagcagatagtggcttaatcgcttctccttgcacttccccatccgttacatcttgaggaatagagagaaaactagcaccctttttagctgtttttgcaattcgaaacgcattcgcaatattttctgataaggtttctggatcttgaatctcagaactatattttgtgataggtgcaaacagtgctgcattatccatactttgatgagtcaactttgaaaggtcagaacgttttacctgtccggctaaagctaaaactggatctccttcagctgttgcggtaactaaacctgttgctaaattacttgctccagggccgctggtggcgatcacaacccccggttctccagtcaaacgaccaattgcttgagccataaacgctgcgttttgttcatgacgagctaaaattagttgtggtccgtgatcctctaatgtatcaaagacgccatcaatcttggcaccaggaatcccaaaaataaatggaacattatgattttctaaactacttacaatgatttctgaacccttcttactcactgtattacatctccttaaaatctgtatcaattatatttgataatatagcaccatttcatttatttatcaacaatgaaacatcaacagaagttgttttatcagaaaagcactgaaattttcattattcttgatttttttgtttgaaaacgaaaaatgaacgatcatgctcattcaaaaagacaagcatcatcgttcgtttgttaaagtgaaaatattttttaaaaaagcttctaccctattcagaaaaattgaattctgctccccagtcaaaatttcccgagcgttcaaaggattgcggccaatgtgcgcaccactcaggcccttgaaaggtttctaatacgtcaaagcttgctgtataaggcttgatatctaaaattggactgttatcctctgcatccagatattcaagatacactttgttaccttggatactggtaatttttgctgccgacagcgcgattggatttggtctaaccggacctcttgtagcaaaggttcccagttcttctggtccgtttgtatagggcttgctgaccgttgttcctctaagttcaggtatatctaaatgatggaaccaatacaaaacatacaaatgactaaaatcatccaaaccgattaatccgtcttgatactctggcaataactctaaataaacacctgcatccgtttgtttcactttgccgatttctttaatttccatgttgattcccccaattattttttgagtcgcgacctctaattagaagataaatcctcacgttgcgtgagagtcaaggaaattaatggaatttgtaactcagtcaggtattcctcaggattttctgtatgttctggacccacatgacaaatttgtcgcgtggcttttaccatgctgaattcaggatgttcctccagccacttagcaaatgcttgataagcttctggaagctgatggtaatttccttcgacatacatgattgccgcatgctccagtgcaggaagctctcgcattttcagtggtgcctctgctacgatatctgaaataatcgctacctcaacatctacgccttcctccagatattccttatcatgaaaaattgttaaattctcatcagggctagtcggaaaagcaattccttgtttttttaacagagacataaactctttccaaagtaatccttcatgataaaagctcttaattctctttctcaaactgacgatggagaaagctggaattttcttgatcgacacttggtattttcctttatgctgcatccgttgaatcatttgatggatttgctgctgacgaaattgatcacgttggatttctttttcaatttcacgatctttttttaataaagctgcggtaaaaatcttcggatcttgttgaatcaagcttttgatttctttcaaagaaaactttagctccctcagtaacacaatctgggctaaaacttctaattgttttactgagtaataacgataacctgattcttcatcaactacttgcggatgaagcagatcgatctcatcataatgacgcaaggttcgaatcgacacctgaccaagctgggaaaactcaccaattttcagcaataaaaacacctccattgctcattataccgatacttaagattgttatcagcaaaaatttatgggataatagatacgaactcttgttcttcttttgttcttgtaaattcaggaaaaaatgctcaggcaaaagcaaattagaatggatggtgtacaatgcattataaagaatataaaacgattttatcagcaaaaaacggtttgaatctctttcgcggctgtacacatggctgcatttattgcgatagccgcagtgactgctaccaaatcaatcatcccttcgaggacattgaagtaaaagcgaatgcattagagattttcgaacatgagctgcaaagacggcgaaaaccctgtatgattggtaccggagcaatgaccgatccttacattcaattagagcctcgattaaaaatgacacgtggagctttggaattgatcgacaagtatgaatttggtgtagcaatccaaacgaaatctgcacgaattttacgggatctcgaattattaacatcaattaatcaaaaaaccaaagccgttgttgaaatgactctgacaacttatgatgaagagatatgcaaaatcttagagccttatgtttctactactaaagagcgatatgaaactttgctgaggtttaaagaggtcggcgtaccaactcttgtttggctctcccctattttgccttttattaacgacagcgaagaaaatattcgcggtattttagattattgtgttcaagccggagtcaaggggattctttgttttggttttggggtaaccatgcgttcaggaaatcgtgaatatttctacgatcaactagataagcactttccaggaatgaagaaaaagtatcaatttgcttttggtgataattacgtatgtaacagtcctaataatgatcggttaatgagcattttcatcgaaacctgtcaaaaacacaatatcctttggcgaacagaggaagttttcggatatttacatgaatttgaagataaacgtgaacagctttcactattttagaaaaataagctaaaacgcttgctatgaaactcgtttcataaattatacttcctttgtaaagaaaataaggaggaatttttatgaatacgtatgtgaaggtccaacaagctgaaacacaagaacattttatcgtttccctgcatttttccgaagaccaattgagacttgtacgaaatcgtggtttcaaacgtccaatcattgagaatcttcaaaaaagtaaaatcaaacatttacttatcaacgaaatgttaggttgtccaatcgttagtttcttttatcaggatcgtcgctatacattctatcaattcggtcctgctgtcatcgaatatttaaaggaaaatttagctgcttaaactaaagaggtgtttctatggcaaatatccgcgatatcgcaaaaattactggctactctgtctccacaatttctcgtgtcatcaacaatcatccttacgttgacgataaaaaacgagaaaaagtactgaaggtaatggcggagctgaattacgtgccaaatcgttccgctcaaaatctgagctttggtaaaaccaaaaatatcggtgtgatcctaccttttgtgaaccatgaatattacgatcagatgctcagcggtatcatgcaagcggcttttgaccatggttatcaaatcagtttgctaccgaccaactacgatcaggaattagagaaacgctatttagcggaatttgcgaaacgagcctttgatggattaattgtcacaactaaggcgaactcaattaaagagttttttgactattttaaatacggacctattattttttgcgaagaaattccgaatgctgatgccagctgtgtttacatcaatctgaagcaatccaccaaagaagctttttcttatatgaaggaaaaaggtatcaaacgtcctggaatgactttgggaagaagcaaaaatattagtcacaactcagagttttctattcgcagcgcaaaagaaatctattcggattttgatgaagcaaatattttttgggattgcatcgtttcagaagacggcattcaagctgctgaattttttaaagctcgaaaagttgatggtattctcacatttggtgatgaaattgccgcaaccattttacagcagtataaaacagatcggcctttcattattggacgagaaaatctgctgattagtgaagtaatgggcttttctactcttgatcatcatttggcggaatgcggtaagaaggccttcgaagcgttttatcataacaagcacgaaaagctctgtatctctcacgattttattaaacgttaaaccgactgaggaaatagttcagtcggttttttcttttcacaaaacgaatggaaaggaagctttacataaaaacgaaaagggtttatacttatagtatggaaaggaagctttccctaaatgaggtgaagaaatgaagaaccgcttagaagaaatgcgcaaagaacgcggaatcaagcaagaggaactcgctatttcactggaagtttctagacaaacaatcggatcattggaaaatggcaggtacaatccctcgatccttttagcatttaagattgctcgctattttaatgtcagtatagaagatattttcatatatgaggaggaggaaaaatgaaaaagtcaatgctttataccggatttgtttacttctttgtcggtattatgagcttggttattgccttaacgaccgcatatccactcgagcctttactgtggggaatcacaggagccggaatcgcgcctggtgttcttttgatcgcaaaatacttttactggacgaaccccgcacgcagagctgactatgaagcacggttaaaaaacgaagcgattcaattaaatgacgagcgaaaaattatgcttcgagataaaagtggtcgacttgcctatattgctatgatgcttttacagttggtattaaccttcgttttttccattttgagcatccttgagtatttttatcctttctctaaatatgcctgtatcggcttgagcattctcttgattattcaatatgtctttgggattgttgcttatcgacgtttgagtaaatctttataaaaataaccagctgaaaaaaacttcagctggttgtttccttatagactgattatcttattgctaacctctttgacgaaatacgcatcatgctcgatcaggatcattgttggtttaactcgttgtaatagctccaaaatttgcttttgattgaaaacatcgagatagttcaacggttcatcccaaatatataaatgtgccgattgcgacaaagattttgccagttccaccttcttccgctgccccatgctcatgttttgaatacaattagcaaaaacgtgccgttccatccctagtttcctcaggttgtttaagaactgtgaataattcaacccctctttttctgcaaaatcctccagcgttccttaattgctttcgtaattctgtcgaacacgactgattttcaatccatttgctcgatgaatcgttcctttaatctctccactaaattctcctaacaacgcgtcgatcaatgatgtctttccactgccgttttttcccgtaattgctaaacattcattaagtaataactcaaaactctttccattgaataagctttttccagaataacttaacgatagctcctctacctgcaaaattcgacgatgataatttggttcataggacatttttaatgcatccaccgtttcgatattttttaacagcttttccttttcagtaatctgtccctctacccgttgaacgattgcttttgagcgtttcatcattcgggcagcatccgctccaattgctccgggactgacgcgacgatattcggtatcgataaagccctttggtttattggttttatctttctccctagaaaaggaccattctgctttttccttcgctgttttttgcaatctgatgatttccttcttcaatttactattttgcgcctgttcataggcatcacgttgagccttttgctcttcataggttgtaaagtttccttgataaagaattaattgactcttctcaatcgctagaatatggtccacggtttgatttaaaaaggttcgatcatggctgaccaaaatatatccttgctttttcttttgaaggtaagctgcaacttgttggcggcccttcatatccaaatgattcgttggttcatcgattaatggaaaggaataatcatctagaaataacagtgccaaaagaactttggtctgctccccgcctgacaatgttgagtacggtcgccaaagcacatttaagtcgcattgtagcaacgtgagttcccgctcaattttccaaatctctaactcttcattttctgatagtgcataataagttaattgattgggatcgtttatttgtttagggaaataattcatttccaactgatgaataatctgcccttgatagggaatttttccacttaacaaatttagcaatgtggttttccctcgcccattccgaccaacaagacccaatttccaatcagctgaaatagttaattttgcatcgttgaacagcagcgttcctaattgatcatatccaaatgttaaacgttcgatttttatgtttgtcattataaacacctcgcaatgacttcaaatgaagccaaaaaagacccagttatttccgaaaaactgggtcgacgagctatttttagacattcgggccttcagaaaataagccctttatgcacaaaaaggaatctcgctgattatccaccaatttttcgaaaatctgcacactgctcccttagtctccagaggtacagtcttaatgcagcttctctacttcactgatgaatcaatcatgcgtgatccctcactttcctttttgtaattttacgatagcatgaaaacgttctatcgtcaaaatttcttaagattttctagtgaaatattactaaaggagcttgtctaatttaaattgctttttgattacggtggttgtttacctattgagtatcgaatgaaaacctctcctccatagaagctaaggataggtcaaacaagtttttattcatttgtttcgtggaaatatttttcctgaaccatttgcatgatttcggcttcagtcagcttcttcgtttcattagcaaaatcataatattctggcttttgatcgtaatacacttctgtcgttaaagtagcatctggcaaatcatcgaacaaatcaatgggaatactgtatgcatccgttggcagcaaatggtaaaaaagatttgagccgcagtttgaacaaaatcctctttcagcccattctgacgatttatatctgctgaccaagtcttcagaatgaatgcgaatatcctttgccgttcctgcttcaaccgtcaaaagcggacctgatccccatttccggcacatcaagcagtgacaagcacctacttctgaatgtacatctattacttcaatcgatactttcccacataaacaagttgctgttttcattctctttcctcctttttcttccattgtaataaaaatatcgtttgcaaacttgatctcatttgtcatttttttgttgaagtttgcgaattttcttttgaccaagtaataagctgattaataatattaggaatttgtattccttcattttctagttttctcaactcatagagccatcgatctccgactgagaataactcgtcttgttcaggttgatgcaaagaaaccactacatttgtttctttgctatgatcgaaatcactcatacttcgatgaatggctgagatactatagcctgcttgacgcagcatgtagataacatgaaacctaactagcattttctccgaatagtaagtagtcttcgctgattcgcaatgatttgcatggacgagcccgtttctttcccaattcctcaccgcttcaacagtcaccccaaaaatttcagcaacttcttttctgttatatcttttctcttctgtgttgtcgtcttgcgtgtttgatgtattgctccaatccaatagtattttacctgcctgctcagcaagctggatttcatttctgatagcggcaatatagtcttcataacgtctttgactcatttgccagtcttgtttagcgatcgcatgcaatagagcatcacctgtttttctaatagctctttttgtaaatggatagccaaagatttttcggcatatttgcaactgcagtacgtgaagctcagtaaattctcgataaccatttttacttcgctgggctttgctgatatacgacaatttttcatataaacggatggtattaggatgaacagcaaacattcttgctaaatcgattactctataaatgtttcctttagtcattttacccctcccgttagtcgtttatctttgcatagtaatgatcttttttaaatagcttatccccattataaccaaaacagctcctgtaatgagtaatatctgttgaacacgcacaatatctgccaaaggaccaaagaaaagaatagcgatcggcattgcactggctgtaattacttgaactattgagaaaaccctgcccaaaagctttggatttgcggtttgttgaattctaacagtttgcaaggtcacgataattggtagcagaattcctgtgagtcctactaaaatttgatacagccaaaagttggagactgcaccttctaaaatcaacaatagaccaaaggttatcagcaggtaggaaattactcttgctttttgtttgacatctccaaaaaacgagagagatagaccgccaatgattgaaccaagtccccaaatgatttggttgaaacttaaacgccaaagctcatttccaaaactgcgttcaattagcaatggagctagcgtagcagcaggtgtaaacagcacaaatgaaagtgcataagccaacatgatttgtctcaattgacgatgatgaaaggtataggttagtcccttctttaaatctgttaaaatatctgatcgctgatctttagagatctttttctctatttttaatcgaaacataatcagaacagctgctgcagccgataaaatatcaataataaatgtccaaacaagaccaaactgatttaacactagtccgcctagtgcaggagccaacaacatcatcgcggaacctaacgcttgattaatcccttgtactcgagctaattgattctcaggtactaattcaggaaaaaatgaggtcaccgcaggagtctgaacaccagcgccaatcgagcgcagcatcgaaacaattaaaatcaaataaaggtttttaaacgctgaaataaaagcaacgactaaaatcaatgttgctatagcaatgaatgtgtcagaaagtatgatcagcgttttcttgttatatcgatctgctaaaacaccgccccataaagaaatcaaagcctgaggcatcatcgagcacacggtaatcattgtcagccatccccccgatgaagtctctaaagttatataccaaatgatggcgtaactaactagctgcgagccaaagagagaaatattttgactcgctaaaaataagccgattactttattcataaatatattcactaagccacctccaatactttgataaaagattagcatgccactacgaggtggtgtatgactgtaagctttgtttttttttgcttattgatacagggttttaaaatgactaacaactgcaaaaaaacaaggatatcttatacatatccttgctcacgtatctatttattttttgattggcaaccagatttctaaacaagcttgaccctctaaagacacataggtctctaattccggtccatcgcatttttgatagtttgtttgcggcaaccatgtattgaagatttgctgctgtaactgataataggcatttgagacattttctgtcttgtgataatcatagggatcacttacaaaaacagcatacgtctgatcaggaatttccaacgttacatattcagttgaaatatcctgatttaaaacaaagccggtaaaataatttaagtatcccgactttgctggggcgggattagcaatggcaaaataaggttctcgctttaacccaaaaaaattcttacggatcgcatcactttcagcaaacgttcgtaatgcttgatctctgaaaaactgttcccactgctttccagtatttttgaacagctcatcttctaaaagaagctccttcattttcccaaccaccgtaaaactcgacaaatgctcaatatgataatttagtgttttaccaccgttaacctggatatccaaacgaatcggcggaaagaaattaatcgctgcatgaatcgattttgtctggcttggtgtgagaccatgaaatttagaaaaggcacgattaaaagcagaacgattggcataaccgcataagtcagacacttcatcaattggaatttcctgacgtaataaatccacagcttcagaaagacgacgattacgcaaataagttgaaaaagaaaaacccgttaaataagtaaaaaagcgatggaaagtatattctgatagtaatgcttttttcgctaagtccttaaggatgatatcttcaaataaatgattttcaatatacgctaaagtagccgaaaaacgttcaaggtcttttgacatgaaactcctcctgtaattctctttaatcagaatagcatatcaaggaaaagttacgaacctctacttgtttatttcacctatttttttcgtacaggcacccaaatttcaacctcatcgccttgaccgtaaacttccaaatccggtccagcagaaaccatctcacctgttgcatagcctgtatttaacaattcatagtcatttgtctgtgctgcccattgggttacaatcgcaaactgtgtctttccagaagtttttctggtacatggaaaaacggcccaactatttgccggtacttctacttctgttaattcttcaggtatctcactggtggttgcgactgcaatataatagtcgaactttttagcatccgtagtatccacgttataaaaacttgcaccaatcaaaccatagggttcatggttgatcaacggcaacagtagctcatgctttccagaagacataacttcattccaaagagctggacaatccttcataccctgctgtttttcattggtggaggcttttttaaatcctgctaacttaaaattgtctaattctacgattcgatagtccataactaatccctctctttcttttcaccactatagcaaacccttcttgatttccttttatcctttttgaagcaaaaaaagagaaagacatactcgctatttatcacaataatcaactatttgaagaaattttaaaataacacttgattatgatttttaatgatattactctaactatagaaggcgccttcggaaatggaggaaaacaatgaacgaagaaaaattcaagacaattcaacaaaagatcgaaaaggattatgaaaatatcacagggatcattgtgcaaaaaaataaccaactactgtatgaacactattttaatgactgtgatgtttcaagcaagatccatgtctattccatctccaaaagtattctttccctattattgggaatcgctcaaggacaaggttctatcagtgaaatggatcgcccaattttagactactttccagagtttcaaccgaaggattcaaccgtcagggagattaccttggaaaacttactgacgatgactacaccctataaatacaagaatggaccactagcttatatcaagtatttcactagtaaagattggactaaatttactttaaagcagctcggcggaaaacagccgatcgggcaattcaactatactcctttgattggtcctgatctattatcagcgattctagctcgttcaacgaatcagagtgtcttagaatttgcacgtaaagaactattcaaaccgctaggaatcaatgttgaaaaagcaattcgcttaaaaagtgcgaaggagcaaaccaaattcaatcaatccactaccgaaaatggctgggtagaagatacaaccggtctgaattctggcggatggggtctaacgctttcgactcgtgacatgagtaaaattggtcaactgatcttaaatcaaggcaactggggaaatcaacagctggttcctaaaggttggttagagaagatgcagcaaaagcacagtcactgggaacaagaacagctagattacggatatctgtggtggatcattgatcctgctaagcccatcattgcagctatgggggatggtggtaatgtcatctatattgaccatgagcagcaactggttattgcgatcaccgctcttttcaaagagaatgtctatgaccgcattgcgtttattcagcaggatattttacctttggtataaaataggaaaggcttcacgaactcgctcagcttttgcttattgccgataaagctagtttgtgaagccggacatggatattcccgttgtaaagcaattaattcatgtgaaaattttacactttctatacatgtcaaaaaaatcaagcagcgtctaaactgcttgattttttatttgctcatagctaaaagctttttgactgtattggcgtttcggatggtcacatgatgattaacagccgtgctggcaatctttgaccagcgagctttattaaaggtcttgcgcggtgctgaccaaaaaatcacttcaccatgatgagcgattttttcgtattcgggttttacttccccgactatttctaagacctctgttatcgtcatcggagggatcataaaaatggcataatggaccgtttcttctgtttgatcccaccattcaggtgcatgtattaagatttcagccaactcatcaactgcaacaatagccaccgaaatgtttaaatcaaagtgctctagtatcaatgcttcgcaaatgtcgattaatctttttttctcttgaatatcactagaaaaaaggacattgccgctattgatatacgtcataaccttagtgaagcctttttgttcaaaagcggctcgtaattgcggcatcgcgattttgttcctaccactcacattgattccccgtagcaaagcaatatattttaccaaatcattccctcactgactcgctaatatttttttaagaacatttttgttcagcatgtgtactgtcaaaaactttccttgataatagaccgcccaattgttaaaaataccaggaagctttttagccttttctacgctgtccactgggatcagggtcaaaggcagattttcctcttcacaataggcctcgacttcctttaaaccatggggaataaagggacattggcgtccaaaataaatcgtcaactcttgattatcaatcgtttgctttcttgcggtatcagaaaaagccggcgcagttccatcaaaggataacgctaataattgataaccaccttcgatttcatcaacagccttgaagccatttttttccataaacttcttatccgataaaaatggcgacttctttttagaactgataacacaaatgccagatttattttgacgtctcgcatcctcgatacaatagttcaataaatttttcccatgaccttgtcccttgtagatgcccgaaacccatagacaataaatatacaaataattctcgccgattaccggcacccatgctgtttctagcggcgcatattcgataaaaacttttccattcgcatccagcttgcggaagacatgcccctcggacaaacgttcaccgatccaagctcgtttagtgtctacacctttttgatgcttcttaccggaaatcgcacagcacaaatgttcatttgccagattttccgttgtaacattcacgtactcaaccatcaaacccctcccctagcttattcacttaagtatagcattaagtaacatttgaacatctataatattttttaaatccgttctcagaaaaagcacacttcaatattagataataaaaggtctataaaaccattgcatatttaagactgttttccttcgtaaatccgacactttcatagagcttatgtgcaggataagcggtatctaaacaggttaatgaaattgaatggtaaccttcatttctggcattttcaataatatgtgataaaaggtatttcgcaatctgcttttcgcgataatccattcttacagcgacgttaaatagcatcagacagggttggaaatcaaaggtgaataaatcaagcgcatattgagtagcactgccaataattgtagtcccttctttgacaacaaaaattttgtaagcttgattttcattatacttctgatatttttctaaatcattgcttgtaccaaaacactcatcaatcagctctttgtatgacttcaaatctattggctttaagatttcaatttccataaacctttcctttctcaataggcaataaatccttccaactgcttaactaatttaaatacagaatacataatactcgctcccaacccttatgttctgaaataactatagcaaggcaacctttcttgaatgtacacgtagtattaacctaagattaaaattttaaaatcattctttttttcaccagcttagccgctgacacagagcctgtcgcatttcaaccaacttgaaaacactcatgagcaagttagtaaaaactgccgcaaagcaaatttttcatattgtcttgagatcgcatattggattttgcatggccttctcaaaaagtgacttatttatctcttttctattgacttcaatcctcaatgtgatatatttatctcataaagagacaaattcatcacattgaaggagtataaaatgaaaaaagaaaaaaatagaaagatagtttttgctggtattttttgtgcgttggtattaggagcagcatctattcactctgtcctgtacaatgacagccgtttaattaaaccaacagtcatttcagagtatgtctttcaaataaaggacgtgcctatgtggattgcactgattcttacaatcgcctatgtacttcatttagtaggcacgatcttcagtgtaatctggcagaataaagcattggaaaagaaatggacgcgaaagattcatccaatgttaggtttacttggctttgctggtttttttggcttttttggtttttggacttatagtgaatggggaatcatttatccatttttcgcttttattttcttcggattttttggtttcttttttgagggcaagttgtctgatactttaaaggatgaactctatgaggaaaatgagaaaaaggctgaattaaaagcctataaaattggttttcttctactatttttagcaatttgggcaattgctagaggaatgctttcgtggaatcttgaatggtgtgcgatctttatgttaagctcaatgtcactgatctatggaattgtattgtttctcagcaagtatttcttatatcgatttgaaaccgaggcttaaaaaatgaatataaagtttgaatgtcacttaaaaaagtatcgaaccttgaagggcttaactcaggaacagctggccgaactagttggcgtacgacgtgaaaccattatgcggttagaaaaagcgcaatacaacccttcactaaaacttgctttagacattgcgaaggttgttgataccccagtcacagaattgtttattttcgagtaaaaaagtacagtccacagacgtttgatcttggactgtacttttatttgttactctaaagatacaagacaaaattcattaattctcttaagtatcctttagatgattcttttgaatttttttaccgtcataatcatcgaatactcatacttaagtaggacgacaatgaaatcgtttttagttaaactaaagaaaacttctgggaggaaattatgctgaaaaatgatcacgaagaaagtaaatctagtcaatgggatacagctgcagcttcttctattaaagaatttcccgctatgagagtgaaaagaggaaaaacattcttcttcgtttcctccatcttttcaacagcgtttatcctgatgctgcttttcattaatactattttgaatttgaatcttgatttcactggatttctaaatattgcttggctggcagcaacttgtattatcggcttcattccatggctgttcttttatcttattgacaaatatcgaatgattacagcctaaaaaaaccttcactcagtaaagttggttctataatatttggtgttgttactctttctgagtgagaacaccaagtatttttttatacaaaaagacatttggttgtcctataattaaatcgctgaacccaatcataggaggcgaaccaaatgtccagtattaagaatatcaaatataaagataattgcctagacaaaaccatcaaacaaatcctaaatattcatgattccaacattacttttcctaaagacgccgtttcaaaagaaaaagtccatgacagaatggccaccgtctttactggtcgactgagctatccgtctcctcggtgtgagtgttgcggctacgactccgtcatccatcatggctacaaagatagctggattcaattactcccttatcaagaggtgtctacctatcttcatctctataaacaacggttttattgtaaacagtgtcaccataccttttcagctaaaacctattatgtcgcagaaaactgttatctctcccaagcgctcaagtttgcgatcgctgttgatttaaagaagaaaatttcgatgaaagatatcgctcaacgttacttggtttccgctaaaacggtcgaacgggtcttggattctttttttgaagaaccacgactgaagcccaattacttacccaaacatctattgattgatgaattcaaaggaactaaggactgtcagggcgccatgtgttttattctcagtgacgcggacacggggaaaatctttgatattttagaggatcgaagaagcttcaagctgatcgcctatttcatgcgttttacttatcacgcacggaaaaacgtttctcatgtcgtgatggatatgaatgcgggctatgattctgtgacaaaggtcgttttcccaaatgctcggatttccattgatcgatttcatgtgatccaacaactcaatcgtgcgtttaacaaacaacggataaaaaccatgaatcacttgaaaaagagcgacccgcaagccatgaaaaagtatcgcaagcttaagaaatattggcgaaccattctgaaaaaaaatagaaaaattaattattcttcgctcaaacaatacccgcttttccaacggaaatacctgacggaatcggaagtattggattatttattatcgattgacgagcgcttacggacaagctatgatgtgtatcaaaatttgttggatgcctttgatgccaaagattataaggacttttacgaacgcattgatcacttacctccgatgcttgatccagcatttaaaaaagcgattctttacttaaacaaacacaaacaagcgattatcaatgcgttaaaatacccctattcgaacggaaaacttgaagggaagaataacttgattaaagtgattaagagagtggcattcggttttagaacctttcgccaccttcgtatgcgaattctgattcaacagaatctttgcgacattatttgagcaaaaaaacaaaaagaaaaaaggaaacgccgaagcatttcctttcagtgatttaatgagaacaacacgatttgacttagagccgtaaagttttacgagtgaaggtttttattcaattgacaaaccataatatactcttcctcattttcatcaacaatctcaaaaccaatctgtagatacatgttcaacgcataattatctttttgaacagccaatgagatttttgcatagccttctctgttcatttttccaatcattgctttcatcaaggcagtaccaagcccccgcccaagatattctggtaaaagtgaaatagccaactcaggcgtctgatcatctatggcagcaaatcccgcaatgtttctaacccaaacggctcccacaattttatcaccaagttgagtacataaacaaaaatctgtctgatacttgccaaaatcttgaatataaacagcaatattcggatcatcaatgatcgttctagggatagacttctcttgatcacgctgataaattgcctgatacaaaaactctcttagtaatgggtattcagatacatgcatttctcgaatgagatactccattaaagcctccccttaacttactgaatcaacatatgaataactgccaagacaattaaatgtatcggatagaagccgtaaaatccccacttgacccacttaggcgaatagcctctttcaccactataggccttcaataacggaatcaccatcagcataccaagccccgagaaaacctgataaagcggaaccgattgtccatcagtaatgtgcattaaagcgtaaagaagtattaaaaaggcggttgtataaagtattggcagccagattccgatttttttattcttccatttgtagaatccgtagatcaataatacaccaattaaagaccagtcagatacaaccgttatcattgaaaagaaaaagacgagtagaaattttaaaaatgatgattttgtcttctcacaagccatcattaataataagcccatgagtaaggtgaaaaagatattattgaccaattcgattgcacgaaaaggatgatttccaccaaacagcaggtgaaaaggataaattgataacaaccagaaaacagtcattcttccagcgtatttttttcgatcgtgagtataataaaagccttcaactaacagataggccataattggaaaagttaatttcccaataaactcagtgaagaaaaagagcacactcgactgttcataaagactaaagccgctgccaatatgattcagcagcattgcgataattgcgattacttttaacttgaagccatcaatggagaaattcatttgccacttcctttttcaaataataactatagtatgccacaataaattcgtgaagtcttcctcctttagtaggataattcacaagctgttaaaaatatttcttctttttcaatcgacgaatcattttcagtgactcttttttcctttatactaagagtatcaatcgattgaaagaaggtttaacatgagacatgccttatcttctactaataatcgtcaaatcgaaataattgaacttctaagatctgctaataattatgtatccgtgaaaaatttagcagacaaagtaaaagcggttccaaaaactattgtgaatgattgtcaagaaattgaagatcagtggggagacattgtccaaatagagaaaaatagcaccggggaattacatttaactgaaaaggataatcatacagttcatgagattttttcagatattctgaaggagtctcccacctttcaactacttgagatacttttctaccatcccgggatattacggtcggatttagaaaaagaactatttttaagttcctcaagtctatatcgacgaatcgttaagttaaacgatggcttggaaaaacgcggactgaaaattgatcgtaatgatctaacccttgtcggtgaagatgaacggcatgttcgaatgttcatggctgaatattttttagaagtgtatgatgtctatgaatggcccttcgaattagaccagaaaatgattttcacaaccgttgctcgtttaaatgaaaattttgatttaaagctcaactttcttcaaaaaacggagtttgctttcttaatagcagtcagcttgatccgccaaaaccaaggctttctcagcaagccgaaacgaaatttagtatctgcacaaaatttagagaattacactgctttaatcaatgatttaatgctgcaatgctctgtgcccattactcaagagcgacaaactgatttgatccaaactattttttggtatgattttgcttgggataatcttgaagaagatgcgcgcatcgatcgtctttgtcactcgatgctttccttaatggtcaatgcactgggaatcacactttccgatctgagccgcagaaattgtgctttacttttgaaatccgtctacacttcctacaagacctacccttatgaaaaatatatcgcctataatcgcgaactgtacaatagtttggcgattcaaagagactttgctgtttttacgaaggttctagaaaaaaccttaaaggatcaagaagcaaagagccgttttccttggtactcgctgtacttccatttgattctattcagactattcatctattgggatgacctgccgaaacaattagatgaactgcgtcaaccagtttctactgaagtttgcagcgacttaggagccaaacacgctcagcttttggcctattatttggagaaaaattatcacgagaaaattatattagatgttcaaccggataaagtgtacgctgaggtagcagccagctcactcacatctgatctgtatgttactaatttttctactccgatcattccaaaggaaaaattattcgtactagaagatattccctctgccaagaaattagccagtttaggcaggaaaatcgaagaatatcgaatgaatacactgatccaacaactagcttacttaaattaagatggaagagactaaatcaaaacgaaattttcgtttgagctagtctcttcatttacgcattaatcactatctgcagtctttccagtgcaattctttcaagatcacctagcctcgcaatttctacactcatcgagcgaagcaactcttggtttcctgtacttcccagctgccaaaagagttcagctaactgatcccaagcttcagcgatattaataaattggcgtccgatctccccaagctcttccttagataaaatcggttcaacttccagtaaaaactcgccatagattctccgaaagatgcctcctccggttccaccatctttgctgatctgaaaatagctggtgattcctgctgtctttaatttcttctgatcaaaggttcgccatttgatgatttcccgtgaaaacttagttatcccattaatacctaataattgggcgggaggcctcaacatcgtttcgcaagtttcgttgattgctgcgctgattgtctcagcactcggtgctttataggttgaaaaatcaaaggtcaaatacttattatttgctggaaaaggtctgaagctgctgcttcgcgcgttttccatttcctgataactgactagatgataatcattggcaatcgtgccttttggtgtacgtatcggaaaattcgaatgatcacggtcacttacgtaaaatatctgtcgttcatcatcgtaaccaaatagcaccaccgcatggccgccaaagtgactcgccgaattcattcctaaatacttcaaataaggcatatccacatagaccatgactggttggttttgttgaagcagcttcttcgcttttgcaaagcctgtagccgcatttttttggctgtcggcagttgatttcgatttgcaaacgttccgctagtttctgctcaaactcgattggctttgatcgaccagagatcattggagaatgcgccaaattaatgtaagcaaaccccaaggctgtccccattccaaaaagcattgcctctgtcattggtatctgataatactcgaacacctgcttcaaagcatttgtgatacagtgcttgccgcccataggtttaaactcgcttatcacatactccatttttttgctcccttcataaaagcagccatttaccttcttacgaataaatgactgctcgccaacttaatttgttctttttgctacaacaaacccagattcggtgacccaattctctgggtttggatcttctcctggtgaaacatgaccgatgttaatcattggtccgacgatctggtactcgttggcttctaaccattcagcgattgtttgggttacctttggcatttgatcaaagctgccactaaaagtcactgacgccatgataaaagcaggtgctgttttaaattcggcaatttttgcctctgggtattcaccaatgacagttgtttgtacctctacatctgcatccttttcaacatactctacatcatggaaaagagttatattcactggtggttgagccatttttgcctggacctctgtaacacctttctgcaatttttgccatagctctccttcaagtgtataggctgctaggactccacgaacactgaggacgtttcgttcaggtatttcttttactactacattatattgtgtcatatttttcccttctttcacattttgtttgaggagggaaatcatccgttgcttcttcaacagctcatctagatcctcctccaatttcttttcttggagattgtaatgctgttctaaaaaatccaaatcgtctgtagtgatgatttctttaatcgtttttaatggcaagcctgtttgctgcagcagtttgatttgattcagcctagataattgactggctgagtaataacgatagtttgttttactatcgattgtttcaggctctaataagcctaaagaggcataatgatccaacgtgcggacagtggtatttgatagttttgagaattctccaattttaaacatcgatgtatgctccttttattttgctagcttacttatagtatagagtcacacgtaacgtgggagtcaataaaaattcaaaagatgttaatataaacttgtacattacttttagtaatgttactattagtaatataaatatggctaggaggaacgaaaatggaaattttttcgattgttggtgcgatgatttttggactgatagcaatcttaacattattagtgacattagggctgcctttaggggaatttacaatgggcggcaaacataaagttcttcctattgagatgcgttttgctagtggaagtgcatttatttttcaattaatcgctatcgttagtatcttatatgtgggtgagattatttcgttagctgttcccttttcaattgctcggggtatttgtattttctttggattttatttattgttaaatacagggatgaatctgatgtcctttagtaaaaaggaaaaatacgttatgacaccattagccctgattgggtctatctgtttttttgttacagcatttttatagtagaagcttttttaggagtgagaaattggatatcatcattttaggttttctaatgattcaaggatcaacaatttacgagctgcgtcaatcaattaagaattctctttcaacggtcagcagtgatagtaccggcagcattcaagctgctttaaagaagctgctgaataaacagatgatcacctttaaggaacaggttgaaggcggcttaaataaaaaggtgtatttcattacagatttgggtaaggaacattttcaacaatcaatcactcagccgatgctttataaagaaaaaaatatggagttaagcaaatttttctttatgggttttactgacaaagacaaaagatctgaaatgctagcagattatattcaagtattagaagatgaattagcatcgctagaacaaatcaatgcagcaagcagtcctcgctattcttttgacgaaccctttctacaaagcttaaaagagcgtggcggtgccgttgaatacatggatttagaaaacgtgaaagacattgctcagttccaatatgcaacgttggatcttggaattgagaaggcaaaatttgagatcgaatggtttaagaagtttagagaacgactatcttctgaagaatgttaaggttaaccaaaaaaagacagcaagttgctgcctctgaaatgttacgaatagaaagtactcagtgaagtctctttctatttgtaatttttttgttagcgccattcgaaaaagacttcatacattccctttatgtctttttcgatcaatgctttcgcttgatccgcaaaccccagcttaatcgcattcaagattgctcgatgatttctagccgacttatcgagaatcgggcgtaattgttctttgccgatttcactgattaggcaatggcgataatgacgcaagcgtaattccatcgtttcatacatctgagaaatatgcagattctcagcggcttcaattaggagattatgaaaatcatgatcacactccgcatattcccaactaccatcctcaagatttacttgttcgtaagtaaccgtcaattcttctaatctttttaactgagacggattaatattactcgtggctaaaaatactgcgtgtccttcaattgcaatccgggcctcacacaacataaggctttccgatttgctcatgctggaaacggtataaagcttgccgtttttttctactaaaaattcctctagtaattgatctaacgcttttcgaacaggtgtcctactaatcgctaggctactggcaattcggctttcgtttaatttttgttttggtggcaagtgtaaatgaataatttcctctcgaagaaataaataggttagttcagtgattgagaaaaacggatgttctttttttattttctcaaatttttcagcatcaatcatacacgtctctccaatcccttcatttaaattacaagtatagatcaatccaacaaactatgcaatcgctttcataaataaacaaatttactcctttaattgagcgactgttttattttaaaacctaaaattgcttgacgctcgctgaaagaacttatttagacaccgcccccatctattgtttaaaattaagatgaaccaaaattctttttggaggatgatagtaatggaaaaagagttcccaattgaagaagttcgaaagatgttccctgctttaaaacgagtgcacaatggccaacaagttgtttattttgacggacccggaggatcacaatttttagaaagctcaattacagcgatcagtcagtatatgcgaattggtgttgccaacctccatggaaattttcctacgagccaagaaactgaagcacttattcaaaaagcgaaagaagacattgctgtattatttaatgcacaagcaaacgaaattgcctttggacccaatgccactactatgatgtttcacactagtcgagctctggcaaaccagtgggaagctggtgatgagattatcttaacggagcttgaacatcactcaaacattgactcttggcgcagagcagccgaggaccgcggtgtaatcgtcaagtacattccgttaaatacagaatcattggaacttgaattagataaattagatgacttgattagtccaaaaaccaagctgattgcggtaggtcacgcatcaaactgtgtgggcacaattactgatatcaaggccgtttcagcaaaagctaaagaggttggagctttagttgcggtcgattctgttcacagcattcctcatatgtacgttgatatgcaggagctagggattgatatgctgttctcctctgcttacaaattcttcgcttctcatgttgggatggcggtgattcgaaaagagctatttgaaagcctcgatatttataaagtagtaccagcgcctggaggtgttcctgatcgattggaaatcggcacgcaaaaccatgaaggaattccagctgtttctgaggccattcattttattgcccgcttgggtgaaggtgaaacactcaaagaacagttaatcagcggttatcacgcaattgaagtatatgagaatatgcttgcagaaaaaattcgtgatggattagcagagataccgggaatcaaactttaccaaagtaacaaaaagaaaactccaaccatcgcctttcgtgcggaaggaatctcaccgatcgatttttgtacccgaatgtgtaaagaacacagcgtttttattgcggaagggcatttttacgcgttaaccttggtcgaacgtttaggtattgatcagacaggcggatttattcgagctggtatcgctccttacaacacgattgaagaagtcgagcgtttcttaaatgccgtcaaacaaatcatggcttagaaaggtggaaaaaacatgagcagcaaattatgggaattgttagacgaattgaagtcaccggcatacgaatgggtcgatttgagtcatccagtcaatgaggaaacaccacattatgctggatacaataaacttgaaatgacagaagtctttacctacgatgaacacactgtttgcgccagcgagtacaaaatggtcagccaatatggcacccatattgatccaccctcacattttgttgaaggcggaagaaccctagatcaaatcacagtgaaagaaacagtcttgcctctttgtgtcatcgacctgacagaaaaagtcgctgaggatgtcgactatgctattacggttgaagacttaaccgcttgggaagaaaattatgggagatttcctgatgattgtttcgtagccgttcggacagattggtccaaacgaaaaggcgaagatttctttgctcctgatgaagcgggccagccccattatcctggctggtcgttagaagcactcaagtttttgagcgaagaacgaacgatcaccgcagtgggtcacgaaacccctgatactgatcctgcaattgccaacttaatcgttccttggcagggagaacgctatctcttggagcaagacaagtatcaaattgagatgctgtgcaatttggatcagctaccagcaactggagcgatcatcgcctgcagcttcccaaacgtactagatgctcccggttatacagctagatgtatcgcagtgtatcaaaaataaaaggtaaaacagcggttgtgtaaccgctgttttaccttttatttcaacattcgctcaaccatttttgtcgacatataagttttttcggaaagttgttcaactgtcaaaccaatggcatgcagacgtttcatcatgaccttcatatcttcgccgatttcaacaacgtgcttatctggatcatataatcgtacaactctttgtccccaaggcatttccaggtcttcaccgacacgttctacttctaatgccgcgattttttctagaaagccgtcgaaatcttcttcttcgaaatacatctcggcatcatttccatggtaacggaaaaaatctgtttcacaattcgtaaacgtcgcccatgagttttccgtttgcagggctaatccacctgtcaaggtgatattctctcctaaatcagcaattacgcggatgccgattacttcagtgtaaaatttttttgctttttccatatcctttaccactaacattggtcctttaaatttcattctcgttcctcctatcaacttccttccatcataattttatcatgagattttttttcgatgctcgctaaatgtgcccaattatgcgaggttttattgatccgtttatgcaaagcccattcttcttttgacctctgctgtattctcttcattcgtcaaaagctccagtaaacgaaaagcaacatctaaggcagtttccggagacgacgaagtaataatattacgatcttctacgatccgttcgtttgactgaacaagtacaccatattctttcatttgatcctgtctgggattatttttgaagcgataggtggttccaaagcggtcagtcaaaacgccgcttttagcaactgccaacccggcaacacaaatagccgcaattggtttatttgctttatcaaaatgctgaatgattgataagaaatcctcactgaaagcatcttcataaaagttggcctgctcaaaaccgcccggaatcgccaacgcatcaaagtcattcaaatcgacttcctcaatttgcctcatcggaatgcaagaatacccccaagtacaagacaaaacaggatgcaatcccaccgagacaagctcggtattctgatcaccttcataaagattccagccaaacacatcagtaaaaacactcgcttcataggattcaaaaccattggctaataataaaagaacttttttcatttgttttcccccttattcgtttcattttatgataaagtataaccacttcaagtgacagtcagtttgtaaagtctttccgctcatttaccttactaagcaaaagatttttctgatttagcttaatatttgaaaggttggttcaaaatggatgagacagataaaaaaatactaaatcttttgaaggaaaacgctcgggcaccatatagtgaaatcgctcagcaggtagcacttagttcccccgccgtaaaggaacgaatcacaaaaatggaatatctaggtattattgaaaaatacaccatcaatatcaattatcagaagatgggaaaaagtattacagccttcattctatttgaaacagtaaattgtcaagccttccgcgaattttgtgcgcagcagaaaatggtattaaaatactaccgcattgctgggcattacagctatctcgtaaaagtggttgctgagaacatggaacatttggaagaattcatcgatgagactatgcgttttggggttccttccactcatattgttttttcatccgcagccaatgattccatttaaatcacagaaaaattcgctcagaaattattctctgagcgaatttttttatccaaatctaaatggcgggtgcttcattgctttttctgctaactcaatcaaccgttgctgattatcatctgcggcaacgcgattcgtttttaaagttccgcaggcttgacagcgatgaacaagtgcccattcaccatcttcttttgaccagatactaatcggctccatttgaccatggcacatagaagaacgatcccccgggcgattatcaacatgaagactcaccaaacaatgtggacaatgattccggtgtttactcccagcactttcaggatttgctggcatcccacatctctgacaaacaaagctttctttacaagcagtatgttgataatcttttttgatttgtcgggcaaacttgctgatactcttttgccaaatttccttttcccgtaaataagctgttttatcactggtgtatttcgcctctgcatgaagcttgagataactttcccaacgttctaatgaaagctcatgattctgtaaggcttctttaacagcacagcctggttcactttgatgtcggcaatccctgaatcgacaactttcaaaataaaactcaatatctgcaaagctttcctgtagcccgcgagtaacactccacataccaacttctcgcataccgggagtatcaattatcttcgcgccattggctaattcaaataattgacgatgactcgtagtatgtcggccgcgtccgtcccttttgcgaatctcttgagtttccataatttcttttcccaacaaataattaattaaagtggatttcccaacacctgatgaacccactaatacaattgttttattcggtgaaagataatgatttagcgctgagattccttcgccagttttcacactgactgcatgaacttcggttcctaatgcaacctctctggcggctcttatttgctccaagtagttgtccatttgatcagcctttgtcagcagaacaatcggcattccgccagactgccaagcaagtgtcagatagcgttccaaacgtcgaatattaaaatcgccattcaacgattgtaaaataaaaacataatcaaaattcgccgctatcatttgttcttttcctttagcggaatctaagcgagataatgccgaagttctcggtaatgttgttaagatgaggctatgatcttttccttgccaatcaatgacaacacgatctcctgtcgttgggtatttctcttgtttattgtcatagcagccgcgctttactctggctagcccctgtcctttttcacaagtaaattcaaataaatctttataaacagctgtaatttgagcaattgtttcagctgggtggtttccaataattgtcgtcttcatcgttttgtttttctcctattgttagtctctctccttttcaatgaaacatttatttccgatagcatacaccattctccttcttatcaatcttttattcagagatatctgcctcgaaaataaatgtctcacctataaaaatcctgtaaaagacacttacagattttttcagaaaaacaaaaaagacgatagtcatactatcgtcagagaatacaaacatacgattcattcgacagatatcacttctacaagcacgccaaataaacctgagtttatctgactattcagcttattgattagatacctgtgacactcacaaaacatactccattcatctataggtgcgtaatttattttcatcaccagtatagcaaaccacgtaaagacaaatcaataaaatacttattgattattcatactttaattcatctagcagcttcaaaactttccgtgcaaaaggatacagcacggagccacctccgattacagtcattttaacaacctccatcacttcatcccgtgtcacatctgctttttgacattcctccagatgatagagaatacattcttcacatctcgacatgattgaaatcgttaatccgattaactctttttgacgcttatccaatacatttgcttgataggtttcattatccaatgctgagaatttcttaaaaaaatcatcctcttcacccaaccgtttattatagacttttcgatccttgctttgctccatccaaacactccttgtcagtcattatatgttcaatcatacagaaataaaaaattttttcaaaaaaagcagcaatcgttttgattgctgcatacaaacaatactacttcttaattaatccgtcgtcagttcaatcagatttccctctgggtcctggatcactgcttcatagtatccgtccccagttgttcttggtccatttaataacggaaagccatcagctaaaaaactttcaacatagctatcgacatcttctttcgatcccacggaaatcgccaaatgagtatagcctagactgtcagccactcgattcgacaaatgctgttttgaagtgagctctaaccgactgcctgaatcaaaactgagaaagtaagagcgaaagcctgtctttttattgtggtaaagctctgtactgctggtattgaaataattttcgtaaaattccttcatcgcctctaaatccttagtccaaattgctacgtgttcaatatgcatgtccatttttcctttcttgattcaatctttcaataaagcgcggctccttcgccacatttaccattccctgatccgataaaatataattgataacttctgctccgatttcttgcggcagaaaatcgatcgttgaaaaatttaaaagctgactatatggttgatttccttcgccaatcatttggaaatcttttttatgggtaataccgagttcctgcaagccgttaataattccggcagcagtatcatcggcattggcataaatcacctctggaatcgctaattctttaaaggtttccttcgcccaataatacccactgtcataatcctcaataccagtaaagaaattttgcccttcaatcacttcaccaaaatagttttggtagcaggcggctttatcttgagcactggtactttcagaaagactgcgtttatttgtaaaaataaccttagagaaaccctgtttttttagcatgctgaacaattcttcataggctttctttcgatctggaaagatcatcggaattttaggattggtgaccttttcggttgaaacgatccgcccttttgacttaagcttcgtccaattatccaaattactcgctctagatgttaaaataagcccatcaatcatccgtttttctagcaatgaatagtactcactctcgattttctcatcataataggtaggtaagagcaggacctgatagcccttttctcgcgcgtgaaacagcaaactattaaccaaacgatcgtagcaggagttattgtaaggcagggtaacacctaacgtatagttttttcccatactcaattttaccgcattgccattaaccacataaccagtttcctcaatcgccgcctgaaccttttttcggatatcttcagaaacatattgctgattattgatgactcttgaaactgttgttttagagactcccgtcatctcagcaatatcacgaatatttaccaaaactaccacctcattccgtcctaatactactataggttatgggacgcgtcccatgtcaataggtaaatttattgatagaaaaacagtagctgttccccaactactgtcttctttcatttttatttcaacgcaagctgatagctttcatcaatcagtagtttaatctctttaaaagggaccgttccgtcaagacagatcgttagccagtattttttattcatatgatagcctggaaaatagtttttctcctttacaagtgctgcgaccttttctggttgatttcttaaatctagaatttcgatctgctcatctgatggcaaaccaagtttatttctctgaaccgttaataatactgcataccatttttttgtctcttttcttctgaaaatggcattgcccggagttttaggccagagaaattccaattcatcttgatacgtatcgcggatataattgatgacttcttttgctgactcatttttgaaagaatctgattcaaagcatttatcggcaatatcttgcaggattgactgatactccgacctgactgcacccacaaaggaaccagctgctgaggttcggtgcaggatgtactcttcctcactggcaagttccagcaggtttgtctctacttgtcctttttttgaaatggtcacagtcaattgaaaatccccttgcatgattttcgtatcataagaataaactcccccattttctttaaaaccgtaagcctgtaatttcctgctattcactttttttccttgaaaaaatccatcttcctgagtcatgatacgtcttctcccgtcgctgttttttctattatataggatttctttcagcttaggcaaaaatgagcgcattactccattgcttaaaaaacaattctttatatctatgggctaaaaaaaagatactcttcatcctgaaatctgattcatgatcacagacttactgatagaaaaacagtttccatgccaaataaactccttaacaatagttctaaattattttcctttactaaaccttttcagcatatttagcaagtttttactaaccttcttctttgttggagtcacttggtcgagttttgaagggctttctgtatcttcagcggatgcttcgatcgtcgctaaagctggttctagctctttttccgataggttctgtgaactttgatccaagtaatgctctggtacttcctgtgttgctatcggaatcgtggtgattttatcagtctgcgagtcagcgttttcaatgtgaaacgctgtcaaatctgtttctaacggtatcgttgttttggctgattgcctcaaagctttagagtccatttttcttggatcaatattagtaggcatacttgtccgaaccgtttgctgatcttttagttgcttcgtttcagtagttgaatgctgtgcagactcctgctgttcttttttcgcagcagtttttttaccctttactttcttcggtgccgctttttgcttaactaattcttcctcttcactaacaatccgcttagatttaactagctgtgcaaagcgacgcacgccatttacttcaaaaatggacagcagtgttaagacctcaagaatatgttcaatttcttccttcttttttgaaggatctgcatcccgcagaatccatttatgcttcttcccgctcttatcttcaaaaatggattcaatagaaactttctggttatctggaagaactatttgagaggttgatttatttagatatttgctatattcacgagcggttttagtatgttgataatatgatgttttattcttaaacagacgtagaataatttgattgtattccttgtctgaaaagtacgaaatgaaaaaaggcaaaaactttcgcatcgcttcattgggtttagcagtaaagaatacttcacagatctgttcttttaagaaaaatgaatagtcgccaagcacaagtgcattcctcacgagaaccgcaacagcatattctaacaacgttgcttcatcatgaaactcatcaaattgcttaagtgctttggcttctaggttctttcttattactccaaagatttggcgttggctcagtccgtgttcagtcatttgatttcctactttctattttctattaaagcgcttttatttctaaactttaaaataataatttctataaaataagcatagcgttaatcaccatacaataccaatttattttttttatttttttaaaataattttggatatataggtattattaactttgcgagacaattagaagctttttttctctattaaaagaacagtttatgaaagagataaatatattattctttgttttaaaaagctaaagacgctatatcccctatttataataacgaaattatttttaatgtcgattctcatttatctccgataatagttcatttctcttatgccaaattcaatttttaagtccgagaacagttatcattctcatttgtataattaatcacaaacttgacgtcatttttgatatacttaatctatataaccagctttgcttgataaacaatgttgtgagtatttagagaatttggttgagcgtagaaaggaggacacagaattatatgagtacaaaagtagcgtttgattttatcgaaaccgaaagtcagtaccaagagttccaaaattgcatagaggcactaaaggggcagcgtggcgcacagatgcctgctttgcaggaagctcaaagaatctatggttatttgccaatcgatattttgaaaaggctttctaaagaattggagattcctatggaagagctttacagcaccgcaaccttttatgcccaattcaccttcgtgcccaaaggagaatatacgatcagtatatgtatgggaaccgcctgctatgtgaaaggagctggggatatcttagattcgtattcctctgaattaaagattgaacctggtgaaaccactgcagatcgcaaatttactttagaatcttgccgttgtattggtgcctgcgggttagcacctgtattaacagtcaatgaagaagtctatggtcgtttgtctaagaaaaaagctgataaagtgctcgtcacatatcaaaaagagaataactgattattgatcctccctctccagaaatctactacatatttaaaagccaattgaaaaaagatttgtggaaaaattgttttttgttatacaaaacttcaagagtcaggagaaaaaatatgaaagattggaatgagttaaacgaacttcgaaatacttatcgtcagatgattacgatgcgtttagatgatgaagttatcgaaggacagcaatatgagaaagagattcttatatgtgctggaaccggctgtatttcatctaaaagcggcgagtttgtcaatgctcttaaagaggaattagcgaagaatgaattgacgaataaagtaaatatcgtaaaaacgggatgttttggtttatgtgctcaaggtccgattgttattatttatccagaagccgttttctatcatcaagttcaaccaaaacacgcgaaaaaaattgtttcagatcatttaatcaatgggaaattagttgagaaattactctatcatgactccgacaccaaagagattattaacaaattaatggacactcccttctatcacaagcaaaaacgagttgctctgcgaaattgtggacggatcaacccggaaaaaatcgaagaatatttcgccttcgatggttatcaagctttagctactgttgtaaatgaatactctcgcgatgatgtgttgagtcttttagaaacttcaggcttgcgaggccgtggtggtgctggctttcctactttcatgaaatggtctttcgccaaagccagccaatcggatcaaaaatacgttatctgtaacgccgatgaaggcgacccgggtgcctttatggaccgttccgtattggaaggtgatcctcatgcaatcatcgaagccatggccatcgcgggttatacaatcggtgcgaaccagggctatatctatgtccgagcagagtatcccattgctgtaaatcgtttgcgtatcgccatcaagcaagcacgtgaaaagggacttttaggcaaaaatatttttggtagcggtttctcttttgatctggatttgcgcttaggtgctggcgctttcgtttgcggggaagaaaccgctttgctcgaaagtattgaaggtcatcgcggcgagcctcgtccacgtccgccttttcctgccgtcaagggactgtttggaaaaccgacgatcgttaataacgttgagacattagcgaatattcctcaaatcattcttaaagggcctgaatggtttgccagcttcggaacagaaaaatcaaaaggaactaaagtctttgctcttggcggaaaaatccagaatactggactagtggaaattccaatgggaactactttacgagaaatcgttgaagatatcggcggaggaattcctgctggcaagaaattcaaagcagctcaaacaggcggtccctctggcggctgtatcccagcagagcattatgatgtaccaattgattatgaaaacctgaagaaaatcggttcaatgatgggttcgggcggtttgatcgtcatggatgaagacaactgtatggtggacatcgccaaatttttcttagaatttactgttgaggaaagctgcggaaaatgtgtcccatgtcgtgtcggaacaaaacgtcttttagaaatcctagaaaaaattactctgggtaaggcaacgctagacgatttggatcggatggaagaactctgtcatcatatccaagagaactcactttgcggcctaggacagacagcaccgaatcctgtgctttctaccctgcgctattttagagaagaatatgaagctcatgtcttagagcgccgttgtccttctggcgtatgtaaaaacttgattcaataccgtattctgccagataaatgtacaggatgcagagcctgtgccaaaggttgtccagtaagtgcgatcagtggtgaagtgaaacaagcacacgaaattgatcagtcgatctgtacgaaatgtggcttatgtattgatacctgtcgctacgatgcgattacagtcatataggaggtggagcaagtgaaagaagttatgattaccatcaacggaaaagtctgtactgctccagaaggatcgactattcttgaagcagcacgggtgaataatatcgaaatacctaccttatgctttttaaaggaaatcaatgaaatcggtgcctgccgcatgtgtgtggtagaagtcaaaggtgcccgtagtttagtaacagcctgtgtctatccaatttctgaaggtatggatatcaagactaactcgaaaaaagtctttgaatcaagaaagacgactctggagctgattctctcgactcacgagcggaaatgcctctcttgtatccgcagcggaaattgtgaactgcaaaagctttgtaaagaattcaatgttgccgacgaagattacttcaacggggaaaactgtgaatacgagtttgatgacagcgcagttcatatggttcgaaataataataaatgtattctctgccgcagatgcgtcgctgcttgttcaaaatggcaggcagttggtgtaattggtccgaataatcgcggatttgaaacccatatcggcagcgcttatgaacaaaatctcagtgaagttccatgtatttcctgtggacaatgtatcgtagtttgtccgacgggcgcaatccatgaaaaagaccagacacaagaagtttgggatgccttggaagatccaaccaaacatgtgattgttcagactgctccttcgattcgtgtgactttaggagaagcctttaatatgccgattggtaccaacgtggaaggaaaaatgatcgccgctttacgtcaaattggttttgacagagtctttgataccaatgtagccgctgactttacaatcatggaagaagccaacgaattcttagagcgtgtgggaaataatgggccattcccaatgttcacctcctgttcgccgggctgggtcaaatattgtgagcactatcatccagaattgattcccaatctgtcgacttgtaaatcaccgcagcaaatgttcggtgcccttgcgaagacttggtatgctgaaaaagaaggcatcgatccaaaggatatctttgtggtgggaattatgccttgtactgctaagaaattcgaagtcacgcgggaggacgaagcagcggctggctattccgactgtgatgttgcgttgaccactcgcgaattagctcgaatgatcgacaaagctggtgttcgcttcgtggatttagaagacgaagccttcgataatccactggatgaagcgacaggagctggatatatcttcggagctaccggaggtgtcatggaagcggccttaagaactgcggctgaaacattagccggacaatcactggaacaagtagaatttacagaggtgcgtggaatgtccggcattaaagaagcaacctacgaaatgagtggtgcaacgatcaatgttgcagtcgcctccggaatcggcaatgcaaagaaattactggaacagattcaatccggtgaaaaattctaccactttgttgagatcatggggtgtcctggtgggtgtatcaacggtggcggtcaacctgttcaacctgcatcagtccgtaatttcgttgatctaaaaacaaaacgagcagctgcattatatgccgaagacaaaggtaaaggactgcggaaatcaaacgaaagcccaatcgtccaaaaaatctatcaagagttcttggaaaaaccgggcagtttaaaagcgcatcatattcttcataccagttatcgtgatcgtacaaaagtcaaagtttaactccctgtataaagatagagctgacccaaaagtctcatagactttcgggtcagctcttttttacgaatgaacgaaaactcattttatttagttacttttaaatttttatttcagttgttatttgtttaaagaaggtgtcacttaaccgataaccctgtccccaaactgtaaggatcgattccccttcgactccttggtcattaagtttttttcttaatagtttcactaagcaagacaattgagataagttggaggcattaccggggcgttcccaaagtaattcgcacattttttcccgagagatgatttgatcgtgttcccgataaagaatttgtaaaaaacgtaactgcgttgaatttagtgctaaactactcaatgatcgtttttcattctcctcctcttccgtgaagatctgcctctcctttgaagaatcaatgtagccatccagcatttctcttatttcttccagcatcatatcctttacaagccattcattgatgcctctttcagtccaaagttgttgctcctttttagtcggcagcctttctacttctctaaaaatgcttaacgattgccccttaaagcttttcaataataaaagaacttcttgattcgttaatgtctcactcaaaacaattattttaaaaaaatcagttaatgaagcaactgtgtctctttttatatgaagagttaaaaactgatcagaaagaaaaacctcatgccctaattgtctaaaagcgccttctaaaaaacgctctcgttcgatacattttgtaataaataatatttgtcccatcgttttgctcctttacttatggttaatccatcttagtttctcttcttcattagaatgttaaaaagaagagaaaagcattgatcttctaagcgtatctattagctagatgaagaaatcattctatttttcgttgtttatatagcagaatagatctacattatattttttaatcattcaaactatgacaaatgttaaacaagagaatctaaaagatgtgttcctataaatctctaatagattcgctcctgcaactgatgcttaattttgcaaattcgaataaagtattaatctaatttgctcctagtaacgtcctatttttatcaaaatctcttttcatgcccaatttttttaatttcacgatattttttatccgcaattttgggcaatatttcttgaagtagtttattgtcacttggacaatatccctcagttagataaagaatcggaatttttcttggtaaaaatgattttgtttgattcgacaaagcgatgtccgtaagaattaaatctacttctctgcaaagagaatcagctatttcaatgtaaaaatagtctccaatcgtctgtagcttcgtgctaactagcatttccggtgttcgattactaataataaaaatacgaatcttaggatgaaacaattgcctatccaattcaaagaacagaattttataataggctacacagaaatactcaatatattccgcttcaaatgcgttcaaatttctactacatttactcataaaaatttgatagaaagtccgctctcgctctttattagcaggaaaatcaaaaggatgatagacataaaggtcaatcagccgttgatgcagagcctcttggtaaatcaaaatttgataaaatacacccaccagtcgagcaaatagtttatcacgttctttagttgtcatttcacgcaatgcaaatctttcaaccatatgtactttttcgtttatcatatgtaggaagccaatttcttttagcttcggagattcattaaagaaaacaggaaggctgccatcatagtgtccaagatcgctggcgatgatgcaactgataatgaatttaacctctcgttttaaaatagttggatgaatcatagccattttcttttttagtaacgaaaataaatggtcatacattttcttttcctgaatactaatgggctcccagtaataaacattgtcgggaatcgagcgtttgtttgctcgcaataacgagatcgctaatccataatgaatacttacaaatcttgctgagaattttcgatatattccaacatctaaactctctaataaatttattatttcattcgtgctgataaaaacaaatggccatttatacccaccgtaaacttgttgaaaaatccctgtataaaacaagcgaatcgttacctcgtctcctaataaagtcagcctgcggtctgttcttagatgaagattattggcatttatagtaataaatcgctccaaatagatgagttcttttttgaccattgtatatgtagtatttatttttttcgttatttcagaaatcgtccattcttttggttctaaaaataatgaaaacaactggaaacggtaagaattctctaaataataaagtcgaaaaatcattaatgagaaatttttcttcacattccaaatcactttgttctgctccggcaaatcaatcaattccacatactcgctatagcctaaatcaataatatccatccgtatatcagtaatgatttttttaacagtgggataagaaacctgtgataactttactaattccattagttcaattgaatggttttgattgatatgtaaataatcgagtaacaaaaaacgttttaaataacgactatccattagctcaagaatcatttccaaccactcccttcgaactagaaattcattcttaccatattctacaaaagatagcgttactattaattacattcttttcttaatattagaaaaataaattaattttagattaaaaaagcttattttgcaagaaattaaaatttagtaataaaaaaattcctttttctatccctttatttttaaattattattgagtttaggttacaagaatttatttctgtgatttgttcaatttttcttgatatgtaataaaaaaagaacacttgcgataattattattacttgttggtatctctcctatttaatatttttccatataaaaacaaacactattattaaaaatatttttaaagtcccttcacttaaagtgctttcaaacttaatttctatcgctaataagtgttatatgatactcttcatctaaatatgatgacaaaaggagaataaaatggattttttagtcgataagcttgataaaaagaaactgcttttcattcaaacaatctttgattctgattatcatatctgtactttggaaacacttttgcaatctttaaacatcaataatcaaactgctatttctattttccattcgattcttgaagatattcgtctttctgagagttctagttttatcgatttaagctattctaaatcaaaccagttatttaaattacagctttctgaatcctttaatattcaaaattttataaacttctatatcaagcgatcggctaagtttaagttgattgaatcattgttaatgacctcgtttgataccctgcaagacacagcaaacagcctacacgtatcttactctcacgtccgcaggatcattaccgaattgaaccactacttcaaaccaatgggcttaaggattcattcacgacgaaaagtcaatctagacggtaatgaagtcagtctaagatttttctatactgcgttatatctcgcgacttacggtgctgggtactggccatttccatccttcagttatttagacctgtcctcactcttagacgattgtcctgatgaagtttacaacgttagatcactggacaaaaatgtactaactcattattacttagccattcaccttttaagagaacggcggggctttagtattgataaagaaactatttcgatctccctttacaaaccatactcgctttctaatacagaagcctttagtaccttcgctacctctattggtagatatctgcctcatcattcagagaagaagctgaaggttgagacgcagctgatttgtagcagtctgcttgctattggcagtttctcttctattgatacacctcctgatttttttcttttagatgaacggcttaacgaccaacaattcgctcacaatgcttttcaaattatggatcgaataaattatcatttagatattccgttaactaaaaaagaacaaaataaaattttctactccatattgtgcttacattatcgagttgcttttattggtgcaccgctgaattatactctgacgctgcttccatattattcacatgaagcaattgattctcgaaagaaatataagattgaacatattcaatcgctcgttgaagctgaaatgagatcaatcgaatatgattgcgacgatgatttttataattatcttctttctcaatattgcttaatctatgataaaagcattgaatttggtaaacatacagcaccaattacagtcgcttttctttcgatcatttcaaatcaagcattgcaaaatgacgtgtgtcaatatttctcatcttatttcaatttaaaagcggccaatagtctcgatgacagtgttgacatcatcattagtgagattcctatttcggttgatactatctctgctctgcgtttgcatcaaccgatcatctattgtcatcaaaaacttgttcaatctgactacgaaaaaatcaccgaagctttagtcaagattgctaaaaaaaaatttaagtcaactagttcttaatcacatctgataactaaaaaaatcctctcagttataaaaaatctagaaagattttataactgaaaggatttatcttgaaatctatttagcaaaaatatttgtaaaaaacgtcttagctcactctttgacggcctagcgctttagaaaggacaggaacgactaaaatagataatgcgccgccgatcaaagctgtaatcagctgtggaaacgaaaatgctccggaaaccattgcagctttaggagctggcatttttaataagatcggaacaacgaattgaacaattgacaaatataataccccaaacttcgcaagggcaccaatcaccgtcgctaatgcgaaattcgcaattccctgttttttattgaatccagcgataaaatgccagatagttactaaaactgcgtttccaattgctatacaaaatacaatttgtggaaatgccagcccaataccaagcataaatgcaaaaatcggtgataacaacgcaattgataatccactagctaatccgcctgtagttacagcgacaatcaaaatcaaattgactaaagaacccgtgactaaggtatttcccaatccagctgttactgcctgtacgacaatcaataatgccaataaaacgcctgtttgtgttacccatagtgcttttcgattcatatcttcggagccctatttgtttatggattcacaaatagttatccttcacttcctttctcttttcattttaaaaaatgcgaaaataagtaaacgataaataccatacctaattgtaccagatttggttccgagatagaaaaccaaattcaacagtcatttatcatttatttgcatgaaaggaatcaaagtaaaaattaggacgttatcaaatatttgcaaagattgttcatacagttgtattcaaatttctctttgcatagtctttttcttagaacactagctgcttttttgatacccttttattaagacagaatctatggagggtaaaaatatgaacttgcaggattttaagtggactcgtttgccagaaagctacgagctgttggatgacaaaatagaggttcttacaaaaccgcatacggatctgtggcaaaatacatattatcattttcaaaatgataacgcgcccgttttccagatggaaacggatgaaaagtattttagctttgtcgtaaaaacagattttactgaaagttaccatcgttttgatcaatgtgggattgtcatgtatttagatagtgaaaattggctaaaaggttcgattgaatatgaaaatgaagagtttcagcatttgggaagtgtcgtcacaaatcatgggttttctgactgggcaacaaccgaaatcgatgcttcgattaagtctatgtggtaccgcctaagcagacgcgaagacgactattgtattgagtgctcacctgatggcaaaacatttcagcaaatgcgcatttgccacatgttcaatggaaagaataaaatccgctttggaatttacgcctgctctcctgaagcatcttctttcaaagctatctttacgaatatgcagttgctggattgtcaatggccggctcatgatggacaacagccggatgaatcataagcgtcgctgcttttcaaagattttctaaaaaacaaaaaacccttgattcctcaagggttcgaaatacatctttaggattaacgacggatttctttgatacgagctgcttttccgtgtaatgcacgtagatagtaaagttttgcacgacgcactttaccgtaacgaacaacttcgattttggcaacacgtggagtgtgtagtgggaaagtacgttccacaccaacaccgttagagattttacgtactgtgtaagtttcgctgatgccagctccacgacgtttgataacaacgccttcgaataactgaatacgttcgcgagttccttcgacaactttcgcgtgaacgcgaacagtgtccccaggacggaatgctgggatatcagtacgtaattgttcttgagttagttcttgaatcaatggattcatctttatcattctccttattccaaacattcataggaccacctgtcccagcggaatatcgtataatagatgagctttacactcacctgaatattctaacagaggaacttctatctgtaaagataaaattcttgtcagaagatgattatttcaatttccggcgtgttttgatgaagtgattctccgcaaaatcaaagctgtcttcactaacatcaattgtcaatctgcgggtaagaagctcattttgagtgatattgatcaaataatagattcccttttctttaattaaatagtatttgctaggatcacgccaatgatcctccacttcatggatacccggaagcagtaagaaatcgacaatcttttctttattcgacatttttcttttacggtataactcacagattgtttccgcgttcggaaatttttctaatacgatttgatcttccaacaaagcatttcctttaggctttgtataattcgagcgatcaattgattgtttgattaagtgattatcaatcggttcctgatcattaactaaataatcaatgctcacttgaaaaagctgggcaattctctttaaattatcgatatctggaattccgcggttggtctcccatttggcaatcgcctgtcttgatacctctagtttttctgccaaatccttttgcgataactcttgctctaatcgcagtcgtctaattttttctccactaagcatctgctttccccccactaccttttctgattcaatcatacaattaatcagtcggttataggaagaaactctttgtagcaaaatagttacgtaacgtaacaaggctgatttaatagcatttaatcaaaccactaaaagagcccttgatataaaagggctcgacatacactattgttcttcttgtttgatctctgctaagaatttttccatctcaggagtcaattctaatttttccaacatatctggtcgacgcaaataagttcggcgcaatgattcttttaattgccatgcctcaatcaaacgatgattgccgttcattaaaacttctggaactttcatccccgcaaattcagctggtcgcgtatattgcggatgctccagcaaacctgtggagtgagaatctgtttttgccgaaatctgattgcctaacacttctggtaacagacgaacagttgcatcgatcattacaacagcgccaagttcaccgccagttaaaacataatcgcctagtgaaacctcatcagttactagcgagcgaatgcgctcatcatagccttcataatgtccacaaatgaagactaattgctcctcctgtgaaaattcctccgccatattttgattgaaaggttttccggcaggatcaagtaaaataactctttttttctgctcaccggtttcctcttcaatcgcctttaaattatcatagataggctgtaccttcagcagcatacctgcgcctccaccatatggataatcgtcgacttgcatatgtttattccccgaatacgctcgaaaatcatggacattgatctccagtaaccctttctcaatggccttgccgatgatcgattctcccagcggaccttcaaccatttttggaaaaagtgtcagtacatcaattcgcatcatccaacaacccttctggaatttcaacatggacgattccttccgttaaatcaatgtctttaacgactgattcgatgtaaggaattaatgcatctttttgccctttacgcttaactacccagacatcattggctccaggagataaaatttccgtaatcttgccgatttccttatcgtcttcatctacaaccgttaatccgatgatctcatggtagtaatattcatgttcatccaattccctcagctgtttttctgagattttcagaatgccgtcgcgaaaggattcaacatcattgatatttggatagccttcaaagctaagcaaatcaaaatttttatgtcggcgataacttgcgatggttagtggaagaacatcttgcttttcgcgaaataagaaaagctgctcccctacttggtaacgttcctccgtaaaatcagtcgtagaaatcacgcgaacttcaccgcgaattccgtgagtattgacgatttttccaactttgtaataattagtcacgtagtttcctctttcttttcatctattttgccattgagacagccattttcaaggcactcattgaatcgttattcatgattgtgtatactgtttgattgttttgccaaaccacacgattggattgataatcacctttagccacacgtaatgagatctggccagcatcatacggaactggcaagaaagcttcctctaaatattcaactgtttgtttggctaatggaacaggatcttcttgttcaagattgtttgcctgtacagccaagctccaattgccttctttccacataacaaaactagacccggcaccagcacttcggtaacctgtgatagtatgacctagatcaacctgttgaccatttgcatcataagtctgaccaacttcatttttggcagtttcctttgagtcaaaggactggcgctggaaataagccacgggtgtctgattcttcaacgatggatcattaaagggggttgcttcatttacaatataaaaattgatcttcaaaataccttgctcttcagaagcgctgattccaatctccttcccgctgctgatagttgctgggtcgggaaaattatcatttggataatttgcctttaattcatcgattgccgccatcccatgattgccgtgagtggaatctgtaccagaagaattcgttgctgcctttgtacttgaaatggttgacgaatttttacttgaatcactttttttcgaactcactgtgctggtattctcagtcgtagcaacagtcgatttcgtcgagctatcttttgaatcattatttccagaattacatgccgataaaacaaacaatgcacttagcaaaattaaatattttttcatgatggaacacctccacccatagtttatcgtacttctaatgaaaaaacacccgaatcaaactgactcgagtgttcttactttatttaccatccacgatgttgagacgaacttttttcggtccattcgttcgaacactgtaaacgatcgtacgaatcgcttttgctactcgaccttgttttccgataattctgccgatatcctctggtgcaacgactaggttgtactcaaagaaatctttagattcttcaatctctaacttcacttcttcaggctttgtcaccaaagggtgaacaatagtcaacacaaggttagttaaatcttgcataattgatcaccttacttcttagcgaatttagcttcgtggtgtttttgcatgatgccttctttagaaagaatgttgcgaacggtatcagaaggttgtgcacctttttgtaaccagtttaaaacatcttcttcttttaatacgacttctgcagggtttttcaaaggattgtaagtacccacagtttcgataaaacgtccatcacgaggagaacgagaatcagcaacaacgatacggtagaaaggtttctttttagaacccatacgtttcaagcgaattttaactgccattgtataactacacctccatataattaatcacaagatgtagtctaacacgcttttagttagctgtaaagagttttttctttacaggtctatttttctttcaaagcatattttttgcacattttacttattttttgtaagataataaatgtagataacaacagcgatcgtaatgatcgaattaggaggaattattatgacaaaaacaattggtattttagtcggcagtctgcgcaaggattcttacaataagatcgttgcaaaacaatttgcagaattactgcctgacggctttgaagcaaaatttattgaaattggcgatcttccattttacaatgaagatcttgaagtggaaggctctgttcctgaagcttggacacgtttccgtaacgatgtaaatagcgtcgatggattattcttcgttactccagagtataatcgttctgttccagcagcgttgaaaaatgcgttagatgttggttctcgtccaatgggcagcagtgtttggggtggtaaacctggtttagtcgtgactgtatcccctggtggccctggcggctttggtgcaaaccacgcattacgtcaatcattagttttcttagacgttcctactttgcaacaaccagaagcttacatcggcggcattatgaatcttgttgataatgacggacatattgctgatggtacggttgaattctttaaaacaatcacagataaatatatcgaattcttcaataaattagttaaataatttcaccagaagactgcggatactgttcttaaatgaacaatgtccgcagtcttttttgatgcacttattatgctatactcaatttagaattagattggaggatatcatttgactattactattagacttgaagaagaacgagattatcgcagggttgaagaaattactcgcgaagctttttggaatttatatttacctggagctgaggaacattaccttgcacacacacttcgcaagcatccggattttattccagagctgacctttgtcattgaactagatgaaaacattattggcagcattttttatagtaaagctaaaatcgttgatgctgataacaacgagtatccagtcatttcctttggtcccgttagtatcgcaccagagtatcatcgacaaggctatggtcgaatgctgaacgaacactccatcaatgaagcaaaacgcttaggctatgaggcaatcgtactgggtggctttccttatcactaccatacatatggttttattggcacaaagaagtacaacatctccatgccggatggaaaattttatactggtattatggccttaccgctaaaggatggggcgcttgatgctattagcggccatattgtcttttcagaagggctatatcctgatccccaaggattagaggcttttgatcaaacctttcctgaaaaagagaagaaagtattgccttgtcaagcaaagtttgaagcagctgcaagcgaaatcgatgaacatgagtattaagacagaacgctcctattctttccaatttgaaaaggaataggagcgttcgaatttattttataaagaaatttcgattaagcttgctttaaatgtagctgtgcaaactgaccgaactgttctgtttcgatcaactttagtttttgttggttgatttgtggcaaaaagagcggaacgccctcgcctaatagtattggtacgatttgaatccaccactcttcaattaagccagcttcaatcactggttgcaacaaggcaccgccgccaacaacccaaatcgttttctctgatggtagattttgaataaacgttataggatcttcattaaccacttgaagattgtcatcaacgtctaaatccgtgtgactaaagacaaagttttccttctctggataaagaatttctaactgtgcatcacgttttactacttcataggttctgcgtcccatcatcgtataatcaatcgcttgataaaatacatcataaggtactagttcgccaccttcttgatgatacaaccaatttaaaccgtcttctttatccgctaaatatccatctaaactcattgctccgtagaatactgcgtgtgccatctaatcccacctctttcttctattcattttatcaagtggcaagaccaattcaactttattgcctatcttagtcgttttgcttcatcccagtgttcagctcttcatatcggaaacatgccatctcatgatcgtttacaattccaactgcctgtaaaaaagcataaatcgttgtactgccgacaaatttaaagccgcgtttctttaaatctttggcaattcggtcagacagctctgttttcgccggtacttctgaagcattttttatcttattatctaccacttgatggtcggtaaagccccataaataatcagaaaagctgactccctcagcttgcatcgctagtatcttttgcgcattgttgatcgccgcttcgatttttcgacgattgcgaataattcctgcatcctgcattagcgattcgatctttgcttcatcaaattctgcaacctttttaatctcaaattgttcataggcgttgtcaaaattatccattttatttaaaatcgtttgccagcttaatccagcttggttcatatccaaaactaactttcgaaaaagacgttgatcatcgtattctggcgtaccccataccgtatcatgatacacctgcatattttcattatttcctgaccattgacaccgatacatccgcatcactcctattttcaaatttaaaaaacgaacatacgctccccttgagtataccagaaaatgaaaaaaagtcattgcctaactgaagtgtactatgtatactagcacacgtagatacatggaggtgagtgtatggttcatatcgataaaaacagcagccgtgcttattacgagcaattagtattaggaatcaaagaagacatcttacatggtattttacagcccggagataaaataccatctgtcagagaaatggcgaagcaattgttaatgaacccgaataccatcagtaaagcctataaggtattagaaacggaaaaagtacttgttaccgtcaaaggcaagggtacttttgtacgcgcgattgaagaaacccctagagatgagattcgtatccaagaattaaaagaacatttgaatgaacttgttatcgaggcacgacatctacaaatctcgcagagtgaattgattgcttggatatatgaagcagaaaaaaatttgggaggtcttaccatatgattgtaaaaaatttgaacaaaaaaattgatcagcaaccaatactcacaacggttgagtttgaattagctgaacatgagatcgttgggcttgtcggtcgaaacggttctggaaagaccaccttattacgcgtaattgctggacaatatttacctgatagaggagatatattgattgatcaaagatcgatttatcagcgaccagaattaaaacaggaaatcttttttattgatgaaaaagaaaattttttccgtctctatactcttaaaaaaattgcgcgattctatcaactagcctatccaaaattcgattttgtctcctttaaagaattggtaggaatgcatgggcttccattgaataaaaattaccgccagctttcaaaaggacagcaagcattgttccaaattattttagctgtgtgctctaatgcgcagtatttattattagacgaaccttttgatgggttagacattatcgtgaaaaaagaagtgattggtttactgatgagccatttaagcgaaaattcttgtacggcattgatcgcttctcacaacttactggagctggaaaatttgattgatcgtgtattgctgctaaaagatcaatcgatcatcaaagactaccgtttggaagatatgcgagaaacagcgaaaaaacttcagttggtctttaaaacaaaaaaagtacctatggtaatcaaagaaaattctaaaatgctggattttcaaggtcgtgtcgttactgttgtatttgaaaatttcacagcagaattagaaacagccatcaaagaatttgatccgttagtatatgaagaattgcctttaactttagaagatcttttcgaagccaatttaaaaacacgtagaaaggggattttgagatgatccgtgctattatttttgagcgttataagaaagtactgatcgccgcgtgtctactggtgattggtgtgggtgtatttaacgccttaactgaaaataaacaatggaaaatgatttatcatgaacctcatgccaaagaaaactttgaaaaaaatcgcgctggaatcacctattgggatgaaaaaacggaaaaaaatgttcactatacttcttatcaccaatttcaaaaagctcaactggaattttatcactccgattcaggcggtttcgaaacacttgaagcctcaaattattctgagaaaactttttattattcaaatttttcaacctattttaatggtgctttattgctactcgttcccttattaggattcttgctcttctttattgatcagaaaacagcttttaatcactatcttttttcattaggatgctcacgaaagattctatttcagagtaaaattctctatgtcgcccttccttttttattggtaaccctgattagtcaatttgtgtacgccttgctgatccatgcgctgattccagctccttatatgaatgcgaccttaggacaattagttacttctataattagtcattcttcattactcttttttttattttgtgcaggtacttttattgggtctatggttggaaatgtattttttggtcccttgaccttatttgtatttctctttttgaggagttggctgccaaatgcgatctattcattgagtgacattataaacttagtaaaaggatcaagtcattcctcattaccaagaactttatttgttgattcggttggaaaaaacggtggcaatatgttggtaaactgtattttggttgtcgttggtctgcttttaattttttggacctatcaaaaattccagtcattatcattagaaaacgataatgcctatttgcttcataaagaatcgcgctggccgatctggggaatgatgacgctgtttacttcctttgttctcatttttaatttctttaatccttggatgatctttttgactaaccgaatgagtcggatcgatacgtcaattagccaaccgattctatcgactgtcctagttactctaatcgtcgccggaatctgtggccttatactgtttttcggcgaagtgacgaaacatctagcaaagactcttaacaagttcaatcatcaaatgaggtgattctatgggtgttttagatattttattttctctttatcgaatcggatgtgtctttctaccttgtctgatttatcaatatttttcgctgagaaagaaacaggagaaaattttcatttcatcaatgctttggcgttttattttcttattttatctctatctggtgattgacgtgaccggtgtcggtacgttggaagaccttttaagttatccagaattgattcgccccgaggaaattaatctggttccctttcaatcaggcgttggtctgttgaatcttttgaatatcattatgtttacaccgttaggctttttattgccgttagtttggaaacagtgtcgcaaacctgtggtgtcggttttgctgggtttccaattttcattgatgatcgaattgctccaattgtttaatcgtcgggcaactgatattgatgatttattgatgaacacgttaggtgcatttgtcggtttcctaatttggttgctttatcgcaaattattcaataaaactccgaaagaaatccagtctttctcgcaaagagaaccacagatttatctcattttgagtcttgccggcgtctttttcctgtatcattggcgtttctttttagagctagcttatttttaacttagaaaaattgattttctctattatggaataaaatccacaaaatagcgtctatctcaaaaacgagatagacgctgttttacatcgtatttctaacaaatttcttctattatttacgcttcttttttctcttcttgtttttcttgaccatccggttcatcgccatcttacccattttgcctttgataccattgccaaacatttgatccatcccagcaggcatgctgcctttactcatttgctgcatcattttccgagattctttgaattgcttaatcatgcgattgacttcgacaactgagtttcctgaaccagcagcgatccgccgacgacggctaggatttaataagtctgggttttcacgttcagcaggggtcatggagtaaaccatcgcttttttacgttcaacatcctttggatcaaccttgacattttctatccctggcatttgactcatccctggaatcatcttcagtaaatcttcgattggtcccatgcccatcacttggtctagctgctcaatgaaatcattgaaatcaaagctgttttccttcatcttgcgagcaagttcttcagctttcttttcatcgtaatcttgctgtgctttttcgatcaaagtcagcatgtcacccatacctaagattcggctagacatccgatctggatggaagacttctaggtcggttagtttttcacctgaaccgatgaacttgatcggtgctcccgtcacagcacggatcgacagtgccgcaccaccacgagtgtctccatctaatttggtaataacgaccccagtgattcctaattgttcattgaagctttgcgccacgttaaccgcatcttgtccagtcattgcatcaacgactaatagaatttcatttggttgagcgatttctttgatttgtttcaactcatccattaatgcttcatcaatatgtagacgaccagccgtatcaattagaacataatcatttttattttcgcgggccttttccatcccttgacggacgatttcaacaggactgacatctgtacccatatcaaagactggcacgtctaattgttggcctaatacttttaattggtcgatagccgctggacggtaaacgtctcctgcgatcattagaggacgcgctttttcatttttaatcaattggttggcaagctttccagcaaaggttgttttacctgccccttgcaaacctgccatcatgattactgtcggaatttttggtgatttctcaattccaaccgcttctgatcccaatgttttggttaattcttcatcaacaatcttcacgatttgttgtgcgggagttaagctctctaaaacttctacgcccaaagcacgtgtgcgcacttctttggtaaattgctttacaacttgtaagttaacatcggcctctaataaagcgagacgaatttctcgcatcatttcagtaacgtcagcttctgtaacctttccttttttacgtagtttccccatcgcagcctgcagacgctgcgtcaaattttcaaatgccattgcttattttcctttctattcatctaaatcttgtaagccggtaattgtttcggctaaaaactcatccttgggataatgctccgtcacatataacgccaacttatccagttgttcttctcttacgatgtaatcagaaaacaaatgaagcttgcgctcgtaatcctctaagattttttctgttcttttgatattatcataaaccgcctgacgactcacctgatattcctcagcaatctctcctagagaaaaatcatcggcgtaatacaactccatataattcatttgcttctcagttaaaagcgtcgcgtaaaattcaaacaacgcattcatgcgattcgttttttcgatctccattacgttatcctcatttcttgccagttttcttcagaataaacaggtaagccttgtcggataaaatacgcggttgccacacccattcctttgatccgagttccagaaaagctgccatcataaatcaagctgctgccacaagatgggcttctctcctttaaaaccaggcccgtaatcttcagcttttgtatttcttcaaaggccttgattgctccttgtttaaattcctctgtcaaatcattgccctctttatctagaacttttgctaggccttcccacacagcgaaaccatcaccgccctgtatctcagcaggatgtctaggtgtcggtaaaccgcctaaaacctctggacaaatcatgattgcctgattcttctcaactagctttttcagctctgtaatttcatttgatccaccatcataacgacaagctaccccgcccaaacaagcactgatccctagcattgttatttctcccaacaaattaatagaaaataggtgacaaaactgccttcccattataccatttattcaggtatggaaatagtctttcacaaatgttcttataaaaaaggagacacatatgaaacgtgtattagttgtagacgatgagatttcaatcgtaaagttattgagctttaatttagaaaaagagggctacactgtcaccactgctgaagatggaaaagaaggctacgaattagccttaaatgaaaaatttgatttcattattttagatgtgatgctgccgtcaatggacggtctggagattgcaaaaaaactgcgtcaggaaaaagtcgataccccgattttaatgttgaccgctaaggatgatgccattgatcgcatcctaggcttagagatcggcgctgatgactacctgaccaagcccttttctccaagagaagtcctagcccgcatgaaagcaatctttcgtcgtgtagagccgcgccaagaacctgttgaacacgagtttttaactgctggcgatattaaagcggatttatcaaattatcaggtcacagtacgagacaaaaaaattgaactgacaccaaaagagtttgaacttctagtctatttcatgaaacgtaaagaacgtgtgattgatcgtgataccttacttgatcgcatctggcaatatgatttttctggtcaaagtagaattgtcgacgttcatgtatcacacctgcgggaaaaaatcgagatagatcctaaacatccacaatatctacaaaccgttcgcggctttggctataagtttcaggtgccagcacaatgaaacgcaaacacttagattatcttgtccctttattgcttatttgtttgctctttctcggcagctggaaattagccaaccatttttatacaaaagaattgttagagcagcaagaggagtttttgagtagtaatggtgaactaatgatccatcgattggatcttgctcaacttgattctaacgagaataaaaaggcgatagagagtttttctagagaggccaatgatcggatcactctgttagatgctaaggggaaaattatttttgacagctccgaaccgcagctttctggtagccgggaaaatcgaccagaagtaaaaattgttttaaacagtaatattgttggttcttccgttcgatacagtgctaccttaaaaactgaattgctctatactgctcaacccattaggtctggcgataaaacagttggtattttaagagtagcaaaaagaacctccgcctttcagccgaaaacacgtaacttccagcgaacgatttttgttatcttactgctattttatacatttatctatttaattatttgctacttgacctatcaacggaatcgaccaatcgaaaccgttctcccagttttacagcggatgttgaaagaaccagagaaaagcaattacgtgatgcaggattcgccgcaatggcaggagctctatgttactgtgaatcagattagtgaacagttgaatgcaacctatgctgcctacacatcgacagaagaacaattctccacacttttccatgaactgacgattggtgtcttcatcattgataccgatgggcgctttatcatgattaatccgtctatggaagagctactgcaaatcggcgggattagtcaacaatattattggcaggtgattgaggatcataagttcatccaattgatccaacaggtattagtcgataaaaatcaagtccatcaggaaatctcgactaaactaccaagcgcgatgaatttggatattcgtttacgctatattgaaaatgaagtcgagggcgatcaaattatgggaaccgtctacgacttgacacatgttcgtcgtttagaaaaaattcaaaaggatttcgttggaaatgtctcccacgaattgaaaacaccggttacctcgttactaggatttacagaaacgctcttggatggtgcgaaagatgaccccgagctgaccgcagaatttttgacaatcatgcaaaatgatgccaaacgattgcagcgactgattcaggatatcatcgaattatcaaaggatagcaatgatctagcagaagatcggcaaacaattgagataaattattttttgcaccagcaaattgagttatatcagcatctactaagggaaaaacagatcactgtttcaattgagggcatggaaaattgtttttaccagacacgtttgactttctttcaaccgatcataaagaatctttttgaaaatgcaattcaatattctcccgaaaaaagtcaaattgaaatagcctatcatctaaccgatcaattagaaataaccgtaacagatcatggcatcggtatttcaaaggaagatcaaaaacgaatttttgaacgtttttaccgtgtagacaaagcccgcgctcgtcattctggcggaaccggattaggtcttgcaattgttaaagaatacagcgagatcctcggcggtgaagtcaaggtcgaaagtcaccctcgcttaggctccacctttacaattagattgccaaacaaataattgacaaataaagtaaccccgctagtgttttcatgatgaaaacactagcggggttcgacttttttctttttagttattatttcactgttccatcagcagcgcgttcaaccttcattgaagtaattggcagataacctaattccttcaccggtccattttgcacatcatcgctaaccatgtattctaagaaatcggctaacgctttttccggtttgccatttgtatacatgtgttcataagaccagatcggccatttgttggtcgtaatgtttttatcgtttgctgtaacgccgtctaattgtagcgcttgtaaactatcatcaacatacgataacgcaaggtagctaattgatcctggagtctccgctacaatttttttcactgttcctgatgaatcttgctcttgtgactgaattggctcttttccatctaagccccatttctcaaaagtcgcacgggttccactgccagaagcacggttaaccacctgaatggcttcatccttgcctcccagttctttccagtttttgatttttccggtaaaaatatcgattagttgttgtttagtaatatcttttacaccaacatctttattaaccactggaacaaaaccaacgactgctactttatgatcaactaacttgctggcatctacgccatctttctcttcagcaaaaacatcggaatttccaatttcaaccgagccgctctcaacttgacttaagcccgtgccgctaccgccaccttgcacagagatttggacatttggatgatcctgtgtgtagctttcttgcgccgcatcaactagcggttgtagagctgttgaacctactgctgtaatttttgcggtgtcctctttcgctgatcctgaatcctttgttgcgtttccggtaccgcaccctgctaagagaattcctgaaaatgctaatgctaaaataattttcttcatcatgtacactcctcaatttagatagtaaacagtttttataagggaagcgacagtatgcttttgccgtgtctcttatttttagtacaccgttactttaccaatggaacgtaaatatctgattgaagctatgtaaacgattcgtaaagaactgtaaatattgagtaaagacaaaaatgcttacttttaattagttttggtgtacaatacttttgtaatgaaaagtataatcgagagaagcgaaccaacatgttagtgattacttatgcaataaacaactcagaaaaagaaacaacttatcctggtaccgacgattttgttgcggcacaactaaaagaggtgcctgatctgcctgatttttatcatgttgtaaaagcgactgttgatagcaacgagattgctttgaaggacaaaacgatcagcggtctattcaactatctaaacaagtaagtagtattcggcaaaaagaaacgatcaaacctaaaaagatttgatcgtttctttttattttcctaggtaggttgacaaacggttcatggcttcaaccaaactctccattgaagcagcataactaatccgaacatagccttcaccttcaggtccgaaggcaattcctgggataattgctaattgatttttttcagctaaatcaatacaaaaagccattgaatcttgctcatattcagctggaatcttcgcaaaaatgtagaaggctcctgacggacgtgccacctcaaatcccagtttcgtcattgcttgatagacataatcccgacgttctcggtattcttcccgcatgacctctgcatcagaaattccctgaactaatgcccgaaccgcggccttttgcgagatcgttgaagccgctgtaactaaatactgatgaactttaattatttgttctaccaattctgctggagcaaaaataaatccgattcgccagcctgtcatcgcatgagattttgataacccattgatgacgattgtttggtcgcgtaaatattttccaaatgaaacatgcttcgtttcataatttaattcactataaatttcatcactgatcacaaaaattgggtactttttcaaggtttcacttaaagcagatacttctgcttcattataggcaacgcctgtaggatttgatggcgatgtaatgatgattgctttcaccttatcgccgtgttcttccattgcctgatcgatttgttccggcgttaaaacaaaacctgtttcccgcgtatcaatataaacaggttcagcacctgctaataagattaatggctcatagcctggataagtcggagccggaagcaataccttatcaccagcctccaaaattgataacaaacttgccgacaacgcttccgttgcccctactgtcaccaaaacttcagttgtaggttgataattgaccgtatatttttcagataaaaatcgactcgctgcttctcgaacatcaattagacccgacatgccagtataatgactaaaattatctttaatcgcctgttgccctgcttctttcacgtgttcaggggtattaaaatccggctctcctaacgtcaacttcaacatattaggaattccagagactttttcatcaaattgacgaatcaatgagacggcgatttcatagacatttttgttaaatcgatcttgcaatttattcatataacccctccatttctaatcatattatcacaaaagctcagatagtaaaggaaaaatatcggctccatgctagtgatttgaaaagaatcgtcattcttacatgatttatttcaatacttacactccctttttagaagtttactaatttaatgtctctttcttttttagaatcgtaaaaaccattttaaaataaaaaaatttagctctaaataacttatgatttattgataacagtataaaagaactttcattatccatagtattttactgttttgtgttgaattgaccatttaacaatcataaaataaccatacaataaatgattgtcgaggtgatccctacaatgagtaagaaaacaatcatgcgtgtaccctttgttttctatttaattccctatgttcatctatctttagcagttgattacttatttgattcaatcatagggatttttctatttctgctccttaccatactgattggcttttatgcaaaaattactaagcagctatccttattggtttttggtaatctcgtcaatatcatattgagctgctcattaattatttttaagagtcctttagtcagcctatatcattccacttcgccttttatagcggcaatcccattgatcgttctctttttgatgacacaattaactggtattttttggggctatgtccttcataaagaaatgtcgatttcaatcagtaaagaaaagaagaattaaaaagcttcggatcagtatgaatgatccgaagcttttttgtatcaacttacttctaagtctttggttggtttaatccatatttcgatctttggctcatctgttacatttacatatttttgcactagaaaaggagccatattctccatttctattccatgccttttgagccaagtcccaaagaaatagtcgtttgccttgtacaaagcatcttctaccagatacttgaagttttccgcttcaaacgtgcaaacatagtagattccagggttcatttgatagtgattataattcgtcaaggtttgagcatccgataatccacctacaaaatattggactttttcaggagtggtatcactcgtaaagcagtcaatctgtaccccattctcaattaaattaggaatcgtttcttgtttctcatgaaattcatcccataactcaatcaatacattgactcctactttgttcatttcacgcgactcgacttgtctggaaaatccagtatagtattcggtttttgccagttctcgcctgtttacttcaagaactagatcgtctaccactaacggcaccccttcatccaccaccgtataataaatcgatagatccggctttaaaaaatccgtcaataacagatcatttttacgataagtctccggcgtaacaccatatatttctttgaaagcttttgtaaatgtctcatgactattaaaaccgaattcacaagctatgtcagcgatccgtttatcggtcttcaacaacgatttagcatttgctactcttctcgctttgatatactcattaactgtttttccaaccaaacggttaaataatttttgaaaatagtataccgatagataagatacctttgctaattcttcgattgatagctcttccttgatattttcttccacataatccactgacctttgaatagcatcccaagcatgcatctaactcaccccttatttaaataaatctgattttcatgccgccatcatctttataagaaaatagtagcatatcttttagatgcaggcttgttcgctagtgctatctgctatttatctaactcttcaatcggtgtgatcactggtttgccatctttaactaacaacggtgtcaatcccccagcgtagcctactttattgaacatataattcacacccgtctttcgatcaacaaaaatcatgatcgcatccaattttccttgagaataaacccttacaaaccgatcctttgtcattacaattccttctttctgtttttttgtagaacgttttcatgaaactaaatttagcgtaacacaaccaatttatctggacaattgctaatattcattattcttcaaaaaatgtgaaaaaaattgctataaaagatggttaaatgaacttattcttgctttaattaatgaattaattaaccttcacgaactattcttgctaaaccttaaactgtcataatcaacgaaatcaatcaaaaaagttccaaactcaaaatatgagtttagaacttttttgtctataatctgagagaaattattgcaacgatttctcagttttttttacaggtatttgaatttccgtcagccaatcatcttcactatctttattccacataccatcgatataactttctcgaatagaaccaataatctcataatcattatcctcaacaaatttaatcgctgctgcgaatgctctaggaatattttcataaggacctttgtgcattgtacagactgcttgaggcacttcatccatcctcttaaattttaattcatccgtttcttctttcatttcaactacggattcacagacttcaatatcgatgttctcttctttatatccagcatcatgataaatattgaagcagtattcaggcaatgcacagacacaaccagccttctccatctgtgagcccatctcaggaatcattgatgaaagagcttcaaagctgggaatgattttcctcattgatgcaacgatgacttctggtaatcgtttaatcaccatatgataattatcatcctcttgctgcaaatacccttcaatctgagaaagcatcgacattcgatcagaaatttccttcatcagctgctgcttttttctttgtaatatccgctgctcactttcgccatcttgtacacgtttaatttcttctatactatagccaattctgcgtaatgcgagcaaacgatgcagaggttctaattgactcgaactatagtagcggtagccgttatcaggatcgataaaacgggggcgaagcagccccacttcatcgtaatagcgtagtgctttgattgtaacctgattcattttagagaacataccaatgcggtataatttttcttcaactttttcacattcgtgatccacttcttttccccctaatttctggctattcccagcgaaagaatttcgctgctaaaccgaatcccacaatcgaaattacactcaacaatattatgacaaattgtggatttccaactggttgatttagactgacgctttttaacaattgaacaccttgggttaaaggaagcacgctggctactttctgcatccctcttggaaaaatttcaaagggaatcactgcgccagataaaaagagcatcggaaaataaaccagactgcacacaaggtttgcgatcttcatatttttacatagacttgcaatcaataatcccaaactgtacatagcaatcataactaaaaaataactagcaatcaataagagccaattaccctgcattcgataatcaagaaagacgatggctgccaatgcaacgagtcctgcagaaataatcgccgttgtcatagctactaacacctgagttgcgattaaatgtccaggtgaagcgggtgtcacgaaaaagtgcttcaatattttcttgtcgcgataatcacaaattgttaatggaattcccataaatgcagtggcgcaaatgccaacgactaaaagcgagctaaaactgctgtctaaaaaagtataggatgtatttcccgcctgcttatttccagcaatcatggtcgtcaatagcaatacacctagaggcattccaatcccgaataaaatcccatcaatagaacgaatcgccaattttccttcaacctttgccaaattgattaccttattcatcttcgtcctcccctacaaaccaaagatacgcgtcttctaaattactctgagaactctccgccaataattctggaatacttccttcaacgacaatgctgccattcttaatgaggcaaatacgatcacatagaatttcagcttcttccatataatgcgtcgtcaaaaagattgttaaattggtcttctttaattttagcaaagtctgccaaaccgttctgcgtgcctccgtatctaatccagtcgttaactcgtccaagaaaataatctctggatcaggaatcaaggctaacacgatcgagagcttttgtttttctccgcctgaaagcttctcaacaggttgctttttaaacttctctaatttaaacaatctcaacaactcacggtaatctctaggtttttgatataaactagccaattctcgacatagctcattcacgtgaatattattttgatagctggaagattgcagctgaactccaactttttcgaaaacttctcgtcttcgcttacgtggatctaatcctaaaatttttgctgatccataatcaggccgtttaatacccaacagtgtttcaatagtggtcgttttccccgctccatttggccccaataaaccaaaaacttcacccttattgatggtgaaggagagttggttgacgattttcctacctttgatttctttagttaattgatcagctgtaatagctacactcacgatgatcctcccctttcattaacagaatactgtctcctgttaagggagagtcaacagcttttcatacttttattgcggccttactatgaaaatcgttccctctttttgataaccttgcttttcgtaatagggatcaacatcgctcataacatataccgtttgttcagggaaatctttgcaggcttgctccattaaaaagcgaccatagctctttccacgacaatcagcatctactaataaatcataaacatatacgccaaaaccatcatcttctcggcaacgaacatacccacaaatcttttctttctcaaaaagtaaataagttattgatgtcaataaaactcgcgcgtattttttcttcccttcaccattacaataatctgtccaatcagactccttttccatcattttaaataaatcctctgcatcctcctcttgataagggcgaatataccaagaattttccatcaaaaaaactcctttttattttatactaacaaataaccatcaaaatactagaatttacacaatttaatagattgctattctctaataaaaaaacgttaactataaatggtggaaacaaaaaaggacactcatttttgaatgtcctacttacttaacccttaaaatattctctggtggccttttcgtctatctcaagctgctgaatcaatccttcaacggattcaaaagctacttgtccccgcaacatatgataccaacgtaccttaactttttcaccataaatttcttcattaaagtctaaaatattgatctcaactgtcaacatacgattggttccaaaagtatcattatgacctatcgagcccatcgctggataccattgatcgccaatttgaatttcattgacataaacgccttcttttggcaatttcatatcatcgggtacttggatgttggctgtcggataaccaagttttcgaccccgtgcttcgccatgaatcaccgttccgctaatctcataaatatagccaagtaaatgattggcctcgtctagacgcccctcagacaataaccggcgaattcgcgaagaactaattttttcagtctcgtgttcttctgtttttttagcaacaattactacctcaaagcgctctttcgcatagttaggtaagttttcggcatcagccgtttggtcttttccaaaattgtaatcaaaacctgagactgccacttttgcgtgtagccctacgatgtattgatcgacaaactcttgaggacttaacgcagcgaacgaagatgtgaaggctacctcgtataacaaatcaacacccagctcggacatccgttcttctttctgcttcaaagtcgaaagatattgaatcggcttgctctgtacttgttgaaaaacaattgccggatgctgattaaacgtcatcacagctaattttaaatttttttctttcgcaatttttttaccagtattgatgacttcttgatgaccacgatgaacaccatcaaaaaatcctaacaccaacacacaatctccaacaggaatttcctctgatttatatggatgccgtaatttaacaatttccatttagtgtgcctcctaattcatattattgtatttatttttcttgaagaaaaataagtctgattttcatgccgtatatcatccaactatacatacatttttcctaatcgtaatcagattgggcttttcctctttaatcactgccaaaagttggattgacatcctaattcatattattgtatttatttttcctcagctactaagcctgaggaacttgagcaatctcgtttcgaattactttgcttggtttcaaaagccagtttttttctgggtgttgtccgtaaagactaactaattttccttgataaaaaaatgcgatcagatcagctggcatctttttgattccaaaagatttcatagatagaacttgtccattttttaccttttgccaagcagcatctgttaagtcaattcgcggaaattccttcattgcctcttcaatcggttgcaatgcttgattgatctgacctttttccatcaattcgctaacttgcgacaatgtgactgcctgtcccactgaaaaaccgccgctgactaaacgagtaagatcggacatatgagcaggatagtctagctttgccccaagatcaacagccaaggtccgtacataagtacctttcccgcaagtaacttgaaatctccaactctgagtttttgcttcttcattataaatcggagcagtcgtacgtttaaaactctcaatctccgcttcccgttcagggcgatctaccgtttcaccagcacgcgcatactcatacaatcttttcccgttgactttaaccgctgaatacattggtggtatctgcttgattttcccgataaaagcagccattactcgatcaatttcagcttcagttaaagggcggtctactgcttttttctctactatttcaccactgcgatcttctgtagttgtagaaaagcccaacgtaatctcaccttcataaattttcccactatcttgtaaatattcgatcaccttggttcccttaccaatacagataggtaataccccatcgacgtcaggatccaaagttcccccatgaccaaccttttttgtttgtaaaatttttcgtaatttaaagacacagtcatgacttgtcatgccgcgctctttccataacggcaagataccgtccatcgctgtttcctcatttctatttataatcaacgctcccattatagcatagctaatctaagaaataaccagccaactctctgaagatatttacctgatcttttattaatgccaaagaaaaaaccgccaagttgacggttaatatttcttttcttttgcttttttcttttgtcgttgtcgactgatcacaaatgaaatacttggttctgatcgctgttgcatagcgtaagactctaattgattaacttgatcacgataattatttgctgaaaaattggtgatatcttcgcttacttcatatttatcaataatctttctctctaaataaaatccgcgtatcaattctttcgcataaagtggatcttgctgaatcaaataagtaccaaataaaccatgtccactgacctgattcatcaaattttttcgttcatccacaaagaaatcaatcaagtcctcatcataaacatcccgtagattttccaaactatccaaaatagcttcactattgcgaataaagatttttctaagagttgaaatatcttcgttatcaaccgtctctttacgcttttgccgacgttcccaaaacatttttggatgcatgataatacgaataatccgccgtacaaaaattaaccaaaagctaagcaatgacagcatctgttttgtcactgactcagacacatttgaaatgaaacgagaatacaaccgatacgcacctgaattgatctgatgtcttctaaaactttcatctaatccatctcgttcaactgaaataatcaacgcttggatttcttgaaattcttgttgcgcactttccggcatcgaattattgaagagcgtttggattcttccttgataatttgcgatcaccgcaagcagtgcaaagcgttctttttcattcaattttttattatccaaatcttcgtaaagctcgctaattacttcccgtaaaattaacattcgtttaggatcagttggcggtaccacttcaccttcagataagattggtaataaaatcattccgataatcaatgttagaaaagtcacacaggcggtgataaacagcagtaaagatctctcaggaaactccaatccattgatcgttgttggtaaaataaaaatagttgcgatactaactgttcctttgacaccaccaaaggttaacagcaagcggtctctcagctgttcatgatttttcttccagccttgagtcacaatgtaatagccgctaacgaataaaaagcgtaaaacaaatagtaaggctgtcaataataatacaatccctaacaaatgcacattggaataatttcgactattccacacaggagaaaaaacttgagaaagttcaattcccaaaaaaatgaaaaccaatgcattcaacataaagctaatcgtactccacgagctttcagttacattggaaagctgtgcctcaaatagatttacacgacggaagccggtggcctgcaatacacccgtcacaaccgctgcgataattcctgacgcatgaaacaattcagcaataaaataagcgacgaatggaagtattaattcaatcagcagatacgccgacacatcttgtgcagagattcgctcaataatttttatgacttcatttttgacccaaatgatcactagaccaaccagtacacctacaacgcttgattcgagcaaggatatcgaagcatcagctgccgaaaattgtccggttagcaatgcggctacggcaaactgaaaggctgtaacacctgttgcatcgttgattaatccttccccttctaaaacgtgcatgactgattcaggaatatttaagcgctttgctaacgaactaactgctactgcatcggttggacccaaggaagccccaaaagccaaacaagcagccaatggaatcgctggcaaaatactatgcagaacaaatcccaatccaaataatgtaaagatgacgccgccaaaagccagcagcaatattaagccaaaatgcttcaagattgaagggatatcagcagtttccccttcacgaaacaaaagcggggcaataatcattacaagaaatacctctggttcaaaattgatcgagctaccaacttccgtaagtccgaggataatgccgaggataatctggatcataaaaatcgggaaagacgggaaaacttttgctaaaacattcgacaaggtaatggcaatggctaaaatgatgataatctcaattaggcccattcactcacctcttggaacaattttcttttgccttaaataataattttaagaactctcttttcttattaataatccgatcttccaattcggacaattcttgtgattcgccatctaacgaaagctgtgcacgcttggtttccatacgcagtaaatcatgtttcatccgctctaatttacgagaggttaaaacattaattctttttattttttgtttaacggctttgcgttcttctggacttaagttttcaaattccttatggagttccttcatccgttcttcaaattccgtggtcattctagactctgcctccttgaaaatatccagcaaaaggattatttacaaactgcatacactttaacaggatttactcaataatgcaaaaaagaacctgaaaaaaatctcaggttctaacaaatttattctttatttaagtcgcggatcatttgatcaatcttagagccatattcaactgattcatccaattcaaaaaacaattctggtgtcttgtagattgacaaagcatggcctagttcgcgccgaaccaatccccgtgctttgttcaaaccttcttgtgccttttctttatctgatgctttatcagataacaaactgtaataaatcgtcgcttgttgcaagtctccagtcacgtgaacatctgtaatgttcacgtcttgaacgcgtggatcacgaactttttttcgtaagatgtcattgacttccttcaaaatttcttgagccagacgacggtcacgataatttggcataacgactgcctccttctatttccactaactaaaattttaatagtcacgaataatggatgaaatttcagcagatactgttccacttcctacatttatcagtaggaagtggaattgtaatactatttaggcttgatttcttccataatgaatccttcgatcacatcatcaactttaatatcattaaagttttcgatcatagcaccacattcataacccattttaacttctttcacatcatctttgaaacgtttcaagctggcaagtttgccctcgagaattacgattccatcacgaataatacgcacaccgctatcacgttggatagatccttcgttaacgtaacatcctgcgattgtaccaaccttagaaactttatacgtttcgcgtacagtcatttgaccagtaatcttttcttcgtattcaggatcaagcatacctttcatcgctgtctcgatttcttcgattgctttatagataattcggtgtagacgaatgtcaacttcttcggttgaagcttgctgttttgcttgtggtgtaggacgaacattaaacccgataatgatcgcattacttgctgctgccagggtaacatcactttcattgatagcacctacagctgagtgaacgatcttcacacgcacaccttcaacatcaatttttttcaatgaagctgctaatgcttcggcagatccttgcacatcggctttgatgattacattgacttccttcaattcgccctctttaagagattcaaataggttgtccaatgttacacgagcacttgcactgcgatgttcaagcaacgcacgttttgcccgttcttcaccggctgcacgagctgttttttcatcttcaaagatcgcaaaacgatccccagcttgaggtacatcattcaacccagtaatttctactggtgtcgctggtccagcagatttttcacgacggccaatatcattcgtcataacacgaacacgaccatatgtgttcccaacaacgattgggtcgccgactctcatcgtaccttgttgaaccaataatgttgctacaggtccttttcctttatctaagcgagcttcgataactgttccgattccgtgttgcgttggatcagctttcaagtcttctacttcagcaaccaatagaatcatttctaatagttcgtcgatattttgattgaattttgctgaaatttcaacaaaaattgtatcaccgccccatgcttcaggaatcagttcatactcacttaattcttgcattacatgttgtggattggcaccaggtttatcaaccttattaactgctacaataattggtactttcgctgctttggcatggttgattgcttcgattgtttgcggcattacaccatcatcagctgctacgactaaaatagtaatatctgtgatacttgctccacgcgcacgcatacttgtaaaggcagcatgccctggtgtatccaagaaagtaatcggtttgccgtcaatatcaatttgatatgcaccaatatgctgtgtgattccacctgcttctccgcttgttacgcgagaatgacgcaaggtatctagtaacgtcgttttaccatggtcaacgtgccccataatagttacgactggtggacgagaaactaaattttcttcgtttacatcttctgcatcgaagaatcgatcaatatcagctatatcaatagttactttttcttgtggttcaattccataatccgtagctaacagttcaattgtatctttatctaatggttggttttgattgaccataactcccatcataaataattttttgatgatctcagctggttcgcgatgaatcttcttcgcgatgtctgctacgttcatgccttctgtatattccaatacttctggcaattcgcggaatttacgtggtggaacagcaggcttattactttgttgctgtctaccttttttaccttttttattgaatttgtttttattgcgattttgattgccgccaaaattattgttacggttttggttgccataattgtttttgttgcgattttggttgccgccttgcgttgatccgccttggttcgaacgttggccctgatttgagccattttgatttggtcgcgctccttgactattttgtgctgaacgctgtccttggttttggcgttgcgcattatttgcgttgccttgtgttgggcgctgtccttgattttgacgctgcgcattgtttgtattgctttgtgatgggcgttgcccttggttttgacgctgcgcattgtttgtattgctttgtgctgggcgttgcccttgattttgacgctgtgcattgtttgtattgccttgtgctggacgttgcccttgattttgacgctgcgcattgtttgcattgccttgtgctggacgttgcccttgattttgacgctgcgcattgtttgcattgccttgtgctggacgttgcccttgattttggcgttgtgcattgtttgcgttgccttgtgctggacgttggtgtccttggtttgaacggtttgcgttcgctgagttgttctgtctattgttttgtgtcaattctttatttccttttctattctggaaatttgggttgttcttcgagctctttccatggaattttggtttttcgtgctggttagctgatggttttgcctgagtattttgtttcggtttgctagaaaaagcttgtttcaattttgattcatcatccccggataatgaacccatatgatttttcacatcaatccccaaagtttgtgctttttctacaacatccttacttgattgattcacttcttttgcaaattcgtatactcttttatttcccatgcaatcaccttcctaacctgttattaacgtcataattttgtcggcgaatccttggtctaaaaccccgattacttttctaggtttgccaatcgcgcctaaaatctccccttgagtaaattcgacaaaacatgtcgtttgataatacttacttttatctgatactttcttttgagtgttttcactcgcatcaatggtgacaataacgagatttactttccttttgcgaatctcattaattgtcatttcttctcctgtgatcagtttgcctgcacgcattgcaaggcctaacatgttcaaggccttctgtttattcattgccgaagagctcttttctggctttttggtgtttcacataatcaagtagttcttgataaaaatcatcacttaattcggtgccaagcgtacggtccaagatatgttttttccatgcttcctcgacttcagctggttctagcgcaacataagcacctcgtcctggtttcttacctgaaggatcaatggaaacttctccttctttggatttagcgattcgaatcaattctttctttgggaacatttcaccggaaacgaccgattttcgcaaaggaacttttctttttttcatttgctgtcctcctaatgaattattggtccgtttgatcagaagcaatgttttcttcgtcttcaatcatattatcaactgtaacttccgcttctgattcaatatcttcaacttcagtttcaatcgcttctacttctgaagtgatttcttcaatctcagttacgatttcttctacttctgattcatcatagttcgcataaaattcttccatatcagactctgatttaatatcaatcttgtgagccgttaatttagccgctaaacgagcgttttgcccacgcttaccgatagctaacgacaactgataatccggaactactacggtgcaaacttttggattgtcgatatcaaagataacatcttctacttgcgcaggatttaaggagtttgcgataaatactgctggatcttcatcccactcaacaatgtccatgttctcaccttttaattcatttacaattgcttgtacacgttgtccttttggtcccacacaggttccaactggatcaatgttaggatctgttgaacgaacagcaacttttgcacgatcaccagcctcacgagcaatgctgacaatctctacaattccatcatagacttctggaatttcctgttcaaataagcggcgcaacaaatcagggtgactacgacttacaaatacttgcgggccttttgacgtattttctactcgtgaaacatacactttaatacgatcatgaggtttataatgctcatttggcatttggtcttgttttgatagaacggcttcaatcttccctaagtttacatagatgtagcgattatcttgacgttctactacaccttgcataatatctttttcgtaggcgctgtattcgttatagataatactgcgttctgcttcacggacacgttgtaaaattacttgttttgccgtctgagcagcaattcgaccaaaatcctttggtgttacttcaaaacggatcgtatcaccaatttcatacgctggattgatttccatcgcatctttcaatgacacttccaattgtgaatccatgacttcttccgttacttctttcacggcataaacatgaatatcacctttcttttcattgaattccacttcaacattttgagattgtccgtaatgacgtttgtaagcagatactaatgccgcttccaatgcatcaattacgatttctttcgaaatacctttttctgcttctagagtatccaacgcattcagcatttctttactcattttaactttcctcctaattcatattaacgaatctattcttcaaagaaaaataggtttgatcttcatcgcatgtatcattccactaaagcggtaaaactgaatcgttgtgaaaagcggaattgacattctagttcctgttaatgaaacgtttcatttactaaaactcgatcgcaaaacgcgcctttgcaatatttttacgatcaaagaccatatctttcgtacgcgttttaattttgacagttaatgtcagttcatcatcagtcaattcttttaaaaatccttgatattgtttttctccatcaatattttgataaagtgaaatattaatgtattctcccatcgctttttggtaatcctcttcttttttcaatgggcgttcggctcctggtgaagaaacctcaaggaaatatgcttgtggaattggatcaggatcaatcgaatccagcttttcactaagcttttcgctaacaaaagcacattcttcaatgtcgataccaccttctttatcaataaatactcttaaaaaccaacttttcccttccttgacaaattcaacctcgactaactcaaaattttgttcatccaagatcggtgttactaagtcagtcactgtttcgactacactgctcaaactgtcagcctcctttaatccattaaaaagagtgagcgaaaattccgctcactcaccatcagtctatgattacattgttatactagcacaattctattgaaaattcaaccgtgtcattttcatgatggaattttctttcattttttttattgaacttatccttttctttacatatcaaagagtgacagttggttttcatctggcaaatctttcaaaacaccatgagtatccatatactcaatcaaggtcttcgaaactttaccacgtgaggccaaatcttccttcgataagaaaataccgtctttacgtgcttcaacaatttgtttggccacgttcaaaccaagtccaggtacggcacgaaatggcgcaatcaatgtgtccccgtcaatcacaaaatcttgagcatctgacttgtataaatcgatcatgccaaaatgaaaatctcgctccaacatttcattacacaattccaagacagtcagctgatttttttccttcgtggatgcgtccatacctttatctgtgattgccttcattgcggccttcaccgcatcttttcctttagccatcgcaaccaaatcaaaatcatccgcacgaacagagaaataggcacaataataaagaattgggaaatacactttaaagtacgctacccgtaatgccatcaacacataagctgccgcatgggcttttgggaacatgtacttgattttcgaacaagaatcaatataccaatctggaacgttgttttctttcattgcagtcaaatacgtttcacgtaacccatcatcaattttattccactggcctttacgcacagtttccataatcttgaaggccattccgctatctaatcctgcatgaattaaatataccatgatatcatcccgacaaccgataacctcagctaagtttgcttccccacggctgatcaattcttccgcatttcctaaccaaacgtcagtaccatgagacaacccagagatttgcaataattcggcaaaagtcgtcgggctcgtttcttccaacatcccgcgaacaaatcgtgttccaaactcaggaattcccaacgtaccagtcttcgaataaatttgatcagcttccacacctaaaacctgtggcccagcaaaaatcttcataacttctggatcatccgtcggaatcgttttaggatcgactccagataattcttgcaacattcgaatcactgttgggtcatcgtgtcccagaatatcgagttttaaaacattatcatgaatcgagtgaaaatcaaaatgcgttgttttccattcagaattttgatcgtctgctggatactgaatcggtgtaaaatcataaacatccatatagtctggaattacgatgatcccacctggatgctgtcctgttgttcgcttaaccccagtagcacctttggcaagacgatcgacttcagcattcctaaaatgcagattatgatctcgttcataacccttgacgaatccgtacgccgtcttatccgccactgtaccgatcgtaccagcacgataaacatagtcctcgccaaacagaaccttcgtataattatgagcctcagcctgataatcgcccgaaaaattcaaatcaatatcgggcaccttatcaccatggaatcctaggaaagtttcgaatggaatatcatgtccatctttatttaatcgagcgccacattttggacaagctttctccggcatatcaaagcccgaaccataggaaccatcttcaaaaaactcagaatactgacattcaggacaataatagtgcggcggcaagggattcacttcggtaatccctgtcattgtagccacaaagcttgaacctacagacccacgcgaaccaaccaaataaccgtcagcattactcttatgcaccaacttttgagcaatcaaatagataaccgagaagccattcccgatgatcgaagtaagttctttttctaaacgtttctcaataatatctggtaatggatcgccataaagctctcgtgcccgattataacttagatccttgatctcttcttcagagccaggaattttaggagtatacaagtcatccttgaccggaatgatttcttcacagctctcgacaattttatcaggaccatcaacaacaatttcttttgctagttctggacctaagaaactgaatgcctgcagcatttcatctgtcgtacggaagtgaacatctggtagactgtgacggttcaacggattagccccacccattgaactgatcaaaattttccgatagattgcatcttccttatttaaataatgaacatctcctgtagcaacaactgttttatttaagtctttaccaatttgaattagattacgtaaaatatcttctaaatccgcctcattcttcaccagctcttgttcaatcaaaggggcataaacagccttaggcatcacttcaatataatcataaaaggcggcacgatttttagcttcttctacccctttttgcatcatcgcttcaaagatttcaccttgtgaacaagccgaacctatcaaaagattttctcgcaatttatttaattgtgaacgcggaattcgtggaactcgttcaaagtattccacattagacatagaaattagtttgaatagatcttttaaacctgcctgattcttcgccaaaatcgttgcatggaatggacgcgctcgtttatacgaatccccttcaccaacgtgatcgtttagctgatcatggtaattcatcccatgtttttcgattgcctctttaacaaaaatccaagctaaatggccagttgcttctgcatcatatactgctcggtgatgttgttccagattaacaccgaatttcttagttaagacacctaaaccaaatcgcttaaactcagggtataagaaacgtgccaattccaatgtatcaattaccggatttggagtttcgggcatattatgtcggacatatgttgtattaataaagccaatatcgaatgttgcattatgggcgactaaaatcgctccttcgcaaaatttttcaaacagctccataacttctttttctggttttgatccacgcaccatttcgtcggtgattccagttaaattgatcgttgtttctgataatgggtgacctggatcaatgaattcttcaaacgtatcaatcacgtttcctttatgcatcttaaccgcggccaattcaatgattgtgtcgtataccgcagataacccagttgtttccacgtcaaacacaacataagtagcgtctgttagtgattcatgcgcatcattgtaagcaattggtaccccatcagaaacgacatttgcttcaacgccgtaaagaatcttcacaccagccttttttcctgccgcatgagcttcgggaaatgattgggcccccccatgatctgttatagcaatagctttatgtccccattttccagcttgagcgactaggtcactagcactgttgatagcatccatcgtactcatattcgtatgcaaatgcagctcagaacgtttttctgtcgcagtatcctgacgctctgggtgtttaacctcttgaatgtcttgagcattcatgacaaggtcacgcataaaggtatcttcctgaacacttcctcttacacgaatccagcttttatttgcgatagcttcaaaaattgcttcatctttttcgccgttagaaaatttctttactacaaatgaggaggtataatcagtcatctttaagatcagaatctttcgtttagaacgtaactcgcggacttccttatcaaagataaacccttcaatcgtaatacgtcgttcctcttcaatgatatttcccatcggagtaatgggttcatctgctggaatattccgacccatttggataggtccatcaaaatgagcggcactttctttctgctcttttttcttcgattcatattgagctaagctagcagcagcttgttcttgcattgcttgcgcctgctcttgttttcgtacttcaaattcctgtaattttttatctgcctgttccttatcaacttcaggatcgattcgcaaatgtggaaatccataagaaactaaattttcttcaatcaatggtaaatactgctgtttcaaaaatggaatgactgtttcattatcaattagcaaaacaattcgttttccttgaatcaaaggcaagggtttactcaaaacctgcttaactaacggtgtatcgcaatcctgttcagtcaaagccatttgccaatagttttgcagaagctcttcctcaaactgattgtcttctggaataatatgtaatttcactgacgcgattgattgaaatgctatttgcagcttttgatggaatgcatagaataattttgctggcaaaatttgtggtgtttgaataaaaaattcccacacacgtgatttctcatgaacaatcacttctttgatctctgatccctggatcatcggatgttgctgttccgtctcggccaattcaatttgtcgtaataaattttcaaatagttcacgattcttagacaaaatgacatctccttcactttttcaagtatgtttcagtatacctgtttttttttatgattgcattagaaaaaggaccgaaaaaatttcgatcctttcattttaaaagaagaaacgctgaatatcgttccacgtaactagaatcatcagaagcataataaaaccaaaaccgatcatagtaatcatgccttccttatctggatcaagtggtttgccgcgtatcccctcaattagatttagaagaatttttccgccatcaaaggcgggtataggtaacagattgacaattcccaagttaaccgataataaagccatcaaataaataaccgttttaacccctgctcgagaggcttctgccgacatctggtacatcattactggaccacctagtttatctaaactaaatcctgtgaacaaagaccctaaagcactaaagattctcttgaccatgtcccatgattgagtcaatcctccaatgactttatcgccaaagcccgttttcatataaggtccgacgccaatttgcccgaccttttcaccattgctttttattgtctttggtgtcatttgaacagtcttttctttgccatcttgctcaatcaacacagttaattctttccccggcttttttgtaactgtgtttgttagatcatcccatgaagaaatcttcttcccgtcaaccgccaaaatcgtatcattatcctctaagccagccgtagcagctggactattttcctgaacctcaccaatttgattagtgttataaaccgctacaccaccttgcaaaaacgctagcgcaataaataataccacggttaaaataaagttattcatcggtccagcgaaattggtcaaaatacgtgaacccagcttcgctgattgaaactgaacgtctcgtggtgcaattcgaacttctgtgccgttctcttcaatcacagtcgcatcatgttgaaccttgtaagtcatctcttgactttcatcaccatttacatatcctttaattactaaatcatcaacaagatcagctgaaatcagttccatcgggatactgttaggcaattgaactttcttgctgacgttaattcgcctcacttcatttttaggagtcaattcaaccgataatggcattcccggacttaattcagtttcttcatcttcaagaccagccatccttacatatccgccaattggcaatagacgtagtgtataagttgttccatccttgcccatgtgagcaatcaattttggccccattccgatcgaaaattctcggactagaatccctgagcgtttcgcaaagaaaaaatgcccgaattcatgaacgatcactagaacaccaaaaacgattaaaaacgtaataatcgtacgcataattttcctaccttcattagtttcttagagacagtttatcacaatctgacaataagatattcattaactgaccaattcatagaaaatttaaaaaaagaacttcggtaaaaaatagtttctttgagttgctgcaacaaaacaatatattttactatttttcagttcaagcaaatctattaattgtaaatcagaaagagacgctgcttgaaaataattttataataaattttttcagaaaaatttttggttgtcgcaggtatttaaatttactcaaaaaaaaagagtgttgccactctttttaaaatactcctagtaaatgcatcatgggaaaaacaaacagcatactgtcgaaacgatccaagattccaccatgaccaggtaaaatagtccctgagtcttttacatcatagtgacgcttgattgctgattccactaaatctccaaattgtccaacaactgaaaatactattgtgaagagaatcattgtcaataaattatgctgaaaaatctctggttgcactaagaaaaacactatagctactacaaccgcactagcaattcctcctagagcgccttcaatcgttttattgggagaaatttctggccataatttatgtttgccaaattgacgtcccaccatatatgcaccgatatctgttgcccaaacaacaaagaacgcaaaaagtaaaatagataatccctctgctcgtgctgtaactaaattttgaaacccaacaccgacgtatagacttgctacgacgggaaaaccagcttcatctatagtgtaagtatttttagaaacaactgaaaaacctaaaataatcattactgttaaataaaataaaagaaaattactattgttgccgcttaaaaatggcagccaacgctccgctggtaagaccaaaaagattgccccaaaaattgcaagaacaccttcaaagctcaaaattgcaagtcctttcatgcgaaaaagctcatacactcctattcctgccaaaactgctgccgctaattcgactgcaatacctccgatatacagaattggaataaaaatcgctagggcgacaactgcggtaatgactcgctgtctcatttcttatcctccttgttaaactcaaagtattcattctataattaagttaaagtatcaactattttactgatgacccaaaacttaggtggaacttgtatccttattcaatccaccaaaacgccgatttctttgttggaaggaagcaatcgccgcttctaaatggtctccgtcaaaatctggccataaggctttggtaaaatataattcgctataggccaattgccaaagtaagaaattactaatccgttcttcaccactcgtacgtacgactagctcagggtctcgaagttcgttaggtagaaatcctgtcatcaaatgatctccaacaatatcatcgttaatctcttgaactgcaagttcttcatttttaacttcttcagcgatttgttggatcgccgtaatgatctcagcgcgactaccataattaagagcaaagtttaaaaccaacccatcattttgtgctgtttgctcaatcgcccgtttcactgcgtcttgtgtgtaggcaggcaaatactcctcatatcccatcacgtgaacctgtacattttcttcaattaattctggaacaaaagtatcaaaaaaatctactggaagctgcattaaaaaatttacttcctcttctggacgtttccaattctcagttgagaaagcatacagcgttaacacttttaccccaaggcgattggcatgcttcgtaattttttttactgtttccatgccctctttgtgcccagcgatccttggcaaacgacgattttgtgcccaccggccatttccatccataatgattgcaatgtgttttggaattgcattattaggatcgaaagaaaaggacgattcttctggtgtatatttttgcttttgtggaaaaaatcgtaacaccatgtttttccctcctttattaagtcaataacttaaaaatacttttaaaaagtcatctgccattataacaataaaatgcagttattcctacgaaaaataaatacctttagcctttttcaatgatttttcttagcaataaaaaagcctgaagaacgattcttcaggtttttttggattaaacttctagtaattctttttctttttcagcaacgatggaatcaatcgctttgatattatcatctgtcaatgtttgaatatctttttcggcattacgcaaatcgtcttctgtcatatcgccatttttttgttgttttttgtactcatccattgcatcacggcgaatgttacggacagcaatttttgcaccttctgattctttctttacttctttagctagttcttttcgtcgttcttctgttagttgaggaattactaaacgaatcacattcccgtcgttagccggattcaacccaatatcactagccaaaatagctttttctacgtcattgatcatatttttatcaaatggtgtaaccattaacacacgggcttcaggaatcgtaattgatgccatctgattaacaggcgttggcaccccataataatcaactgtgatgcggtcaagtaaactcgcattcgcacgtcctgcacgaatttgacctagttgacgttgcaacgcttcttgggccttcttcattttgtctcttgcttcattcattactgcatctgccatgttatttcccccttaccgtcgtcccgatgttttcaccgagtacaacacgtttgatatttcctggttcatttaaattaaagacaacaagtggaatatcattgtccatacttaatgagctcgccgttgaatccatcacttgcaatcctttagcgatgacatctaaatgagttagttcttcatatttcactgcattttcatcaagttttggatcagctgaataaacaccgtcgacgttattcttagccatcaagatcacatcagcatttacctctgctgctcttaatgccgctgtcgtatcagttgaaaaataaggatttcctgtaccaccagcaaaaatgacaatacgtcccttttcaagatgacgctctgctttacgccgaatataaggttcagcaatttgacgcatttcaattgatgtttgaacacgagtgggtacgtcgatattttccaacgcatcttgcaacgctaaagcattcattactgttgccaacatgcccatataatccgcttgtgcacgttccatccccatttcagcaccaatttgtccacgccaaatgtttccaccgccaacaataattgccatttcaatccctagatcgtgaacttcttttatttcctccacgatttcttggatcaccggcggtttgataccgaatttttcatcgcctgccaatgcttctccgctgagtttcaatactacacgtttatactttggttcattcatcacaatacctccactgtcactctaatgatattttagcatactctgtctttgaagccagccaaatttgaatttgcttaaaaaaagggagcgcacatttgccgtgcgttcccgactgtttaaaaacagaattattttttaatttgactcataacttcttctacaaagttgtcttcgcgtttttcgatcccttcacctacttcaaaacgaacgaagcttgcaactgtcgcacctttagaagatacatatttttcaacagtcatgtctggatctttaacgaatggttggtcaaccaaagcgatttctgctttaaatttattcaaacgaccaacaaccattttctcaacaatattagctggtttaccttcgtttaatgcttgctcagtaagaacagctttttcatgttctaattctgattctggaatttgactttcatttacgtaacgagggttgattgctgccacatgcatagcaacatcttttgcaactgactcgtcagttgtgccgttcaatagagctaaaacagcgatacgtccacccatgtgcagatatccgccaaatgctgcattgtcttctttttctacaacttcaaaacgacggaagttgattttttcaccaataacttgtgttgcttcgatcaaagctgcttctaaagtttcacctttagcgtttgttaatttcattgctgcttccatgtcagcaggtttatgttcagcaactaaagatgcgatttctttcactaagtcttggaacatttcgtttttagaaacgaagtccgtttcagaattcacttccacgattgctgcagtgtttccatgaatcgcaactgaagctaaaccttcagcagcaatacggtcatttttcttagctgctttagccatacctttttcgcgtaaaagatccacagctttttcaatatcgccttctacttctactaatgcgcgttttgcatccatcattcctacgccagtcatatcgcgtagttcttttaccattttagctgttacgtctgccatttttaagggcctccttagattttctaaaaaagctgcttcaaaggaaaatatttactttgaagcagcatatgctacgaaattattcagctgattcagtagaagcattgtcgccttccactacatcaacgatttcttcgattgaagttgcttgtccgccatcttcagcaacgaagtcttcttctgctacttgatcttccccttggtttccttcgatgaaagcatcagccattttagcagtgattaatttcacggcgcgaatagcatcatcatttgaagggataactacgtcaatttcatctgggtcgcaatttgtatcaaccatagcaacgattggaatgtttaatttttgagcttcttgaacagcgatacgttctttacgagggtcaacgatatacataacatcagggatgcgaggcatatcagcaataccgcctaagaatttttctaaacgttcacgttctttgttcaaaccaacaacttcttttttaggcaatacttcaaaagtaccgtcttgttccatagcgttgatttgtttcaaacgagcgatacgtttttgaattgtatcccagttagttaaagttccacctaaccaacggtggttaacatagaattgtccagcgcgaactgcttcttctttgattgcttcttgagcttgttttttagtacctacgaacaatgcaacgccgccatcttcggcaacatctttcatgtaatcgtaagcagcatctactaatctaactgttttttgtaagtcaataatgtagattccgtttctttctgtgaagatgtatttcttcatttttgggttccagcgacgagtttgatgaccaaagtgtacgccggcttctagtaattgtttcatagacaatactgacatttgtgtttcctccaatttggtttttgttttcctctcctgctctcttctttataaggaactgacaagcagcaccgccttataaatcaagtcagaatgtggatttttttgtgtatagtcgcctacacacaattagtaattatacaagactctttttaataaatcaatcttttttatttagctttctgttaattattatttagttaggaatactgtttaaaaaatctttttctgctatactgagtgcataattatcatttataccgttcctatctcagaaaaagaatcccaaaataagtgaatgatattcactttatcccttaaatcattttttagagtttaaacgctctactattacacaggcaaggagtttttttatgcgaaaaaaagatcgacacgaactaattaaaaaaatcatttcagaaaatgcaatccgaaatcaaaatgaattgatggattatttacaacaatatcaagtctcggcgactcaagctacgatttcacgtgatattcgtgacctaaaaatcgtaaaaacaattgatgaatccggcaagccacgttttgaattgttccaagatcagcaagaaccgactgaggatgatgatattaagcgacttatacgtatgacaaacaatgttatcgtcaaggttgatactgttcaatttatgactatcgtcagtacacttcctgataatgcgcatttattggcttctgtcctagatgatctttcgagtgaattgattgttgcaacaatggcaagttttgatactattattattatctcaaggacacctgcagacgcacaacaagtcactgcttttctgcaagatccttcacagcggtcaattttctcttaaaagtaaggaagctccctatatctataaaaggctgcgcgaaatccatcagcttttgagcaataagaaaaagctgatggatttcagacatgcatgtatctgctgtaaagcgatttattcaattttgtactttccatacagttcaaaaacaacgcgcccctaattcataggagcgcgtttcactaattttcaggtactttgatttttccatctataatttgttttttagccgttgttacagcttcgtaggcttctttagataactggcccttggttaggtttactccgccttcctttaaaccaaactctaaatgctcaccaccaggaaaatctttttcatatgaggctgctgcaatttttctaactgctgctccaacattctttttagttgaagtcaaggtgaaatttccaattttatcttcagtcatatggtaatcaccctcatctgtttgatctcgatctactccaatgacccaaaccttctgagttttatcgttttcatttcgagctttcgcttcttgaaaaacgccagctccagtgcttcctgcagcttgatatataatatctgctccttctttatacatagaagcagcaatagctttacctctatctggagcgtcataagaagctgcgtattgtgcgtcaaatgaaatcttttttcctagattcttagccccggctttgactcccgcctcgaacccactctgaaaccgttggattactggaccttccattccaccaataaaaccaacatgattctttttagtgctgtaagcagctgctaatccagctaaataagcactttcctgatccttaaatgtagcagaaacaatgttcttttcatttgaaatctcaccatcaatcaatgcaaaatttaattttggattttgttcggccgcttctttaatcgcatccgcttgtaaataacttagactaataattgtcgtaaagccattttcaactgcctgactaatattcgtactgttttcctgcggatcgttcgtttcaagataagtgaaatccttcttggcttttaaatccttttcttctccccatttttcaaggccttcccaaccagcctgattaaaagaacgatcatctacgccaccaaaacctaagatcaaagctatcttctgatcaggttcttctttttccgacttattttcagcttgacctcgaccgcaagctgctaataatcctaccattccgagacaacctaatccaaaaagaatttttttcatacaatgcgccttcctaggtgtcttgacaccttttttattttgtcaaagtataccacagtttgtgttgtttcagcaaaaaaatttgaaatacaaaaagaagttgcaaggttatcctcacaacttcttttccaaattctatgacactacattttattaggtgcgtgaactcctaacaaacgtagatcctctttcaagattattgttacagcatgaaccaatgccaaacgagcctctttttgttcatcttcaactaaaattttcgtgtgagcatagtatttattgaacgcttgagctagtttaatcgaatgctttgcaatcacagatggttcatactgatcagccgcttgcatcactacttctggatagctttgcaataacttgatgatttcccaactatcagaatcgtttaaagcatatattgcttctgaatcaacagcaaaatttcctttttccaaaacagtcatagcacgtgcatgagtatattgaacgtaggggcctgtttctccttcaaagcgtactacttcttctaaactaaaatcgaagttatttaaacgatcattttttaaatcatggaagactaccgcgccaacgcccacttgatgagctacttcttctttatttggcaaatcgggatttttttcttggatttgtgcaagtgcggaatcttttgcttcatttagaacttcttctaacaaaacgattttccctttacgagtagacaatttcttcccatcttttgtaatcaagccaaatgggatatgaaccatttcgtctgaccaatcaaaatccatttccttcaaaacagctttcaattgtttgaagtgcccactttgttcatttccaacaacatatagtgatttaacaaaattatactcacgcttgcgataaagtgccgctgctaaatcacgtgtaatgtataaggttgccccgtcggattttttaatcaatgcgggattcaaatcgtatttttcaagatcgacgatttcggctccctcgttggtttgtaataaatgtttttcttccaacattgtgacaacttcatccatcttatcattataaaaagcttcgccattataggaatcaaattctacttccagcataccgtaaattttattgaactctttcaacgattcactgcggaaccatttccataggtctaaagcctcttgatcattttcttccagttttttgaaccaagctcgcgcttcatcgttcaactccggttcatcttcggctttttcatgaaattctacatatagacgtagcagttcattgattggttcagctttaaccttctcttctgatccccattttttataagcaacaatcagtttcccgaattgggttccccagtctcctaggtgattgattttgattggattataaccaattttgcttagaatcaagctgatagaattaccaataacggtcgagcgtaaatgccccattgaaataggttttgcaatatttggtgaagacatatcaatcgtcacattgccttcatttccaatattactatcaccaaaatgattttcttccttcagaatttgttttaagaccatacttgaaataacttcttttttcataaagaagtttaaatatgggccgaccacttcaattttttcaaacgcttctggattgatttgttctactaattctgcagcaatttgctgtggcgctttacgaaaaacttttgctaaagcaaatgtgggaaaagcaacatccccatgatcaactgatttaggattttctagtaaacgttcaacttctggcaatgtcagattttccttaactgcttcaaaaacagcttgtgcaacgatatctttattattcatccaaattcctccttataaatacttttctaaagataaaaaagtgactagtcctcaacgcttcgttgatgaattgaagagtcaaaataaaacaaaaaaatctctgatgtataaatacatcagagacgagaattcccgcggtaccactcttattgtcataaatgaccagcttaggctataacggtagctgccgcttcatctcaaaagtgcgccctctatttttgtttattcggctcccacctgcccgaactcgctaaaaaactgcacaatagacttctctttttcatcgatgaaataattatctggcatttatattaacagaaaaaacttcatctgactagtcgggaaaaatactttatgctttcggaatgaacaaatttcctaatgttgctgccatcaccgccttgatcgtatgcatacggttttcagcttgttggaattgtaatgcattctcggcacgaaaaacatcatctgtcacttccatttcagctaaattatatttttctttgatttcttcggcaacttttgtttcaagatcatgaaatgctggtaagcaatgtaagaaaatcgtttccgctttctgagttttttccattagtgtttgattgacctgataaggcaacaataaatcaattcgctctttgaaagccgcctcttcgcccatcgatacccatacatcggtataaataatatcagcctgcgctactcccttgtcaatgtcatctgtcactaaaacctttgactcggattcttcagcgtatttttcagcgatcgtaatcaaattttgttctggagatagtttttctggagttacgattgagatatttacacccaaaatggcactggtaattagcagtgagtttgctacattgtttcgtccatcacccacataggccaaagtcagatcctccaactttccaaagtgctccttgatcgttaaaaagtctgccaacatttgagttgggtgccatgcgtcagtgaggccattccaaacgggtaccccagaatgttctgccaaagcttcaactgccgtttgtgaaaatcctcgatattcaataccatcaaacatactgcctaacacttttgctgtatcctctacagactctttttttcccaattgaatatcatttttacctaaatattcgggatgagcacctaaatcattagcggctgtcgtaaaagccgccctcgtacgcgtagaggtcttttcaaaaagtaacgcaatatttttccccgctaaatatttatgcggaatattttgtttctttaattcttttaaatgtgctgcaaaatcaatcaaataaagcaactcatctttagtaaaatccgtttcctttaaaaaacttttcccttgaaagatattcatcatcataacgcctccatttttgaatattcattcgttacatccaacattatttcatttttattcataataactgaataaaatgaaagtatcaacctcaattttgaaatatttatataaaaaagcttccttagaagaatttcaaggaagccatctatttgttcgtttaacgagttttgatgagattcagcttacagatgaatactcttgcgcgacaagctcgctttcaagttgaagaccgtatgtcatctagaaatcaaaggtttcactgcaatgaaagcatcaattagttcgacagataagcctaaagtaaacaagaaattttaaagcctagaaccaacataaccaaaagagaacattcttattctcttttcctaaaaaaaacagctgcttaagtgactactttttttgcaattttcgaatacgcaatgtaattagatatttaagatcagtaaatgcttgctcggaagtaagttcaacgacaaaccagtgaccgcccataactggtttgtcctctttaaacgtttgctgaacggattgtgacattgaagcaatgttctctgctaattcttcctgatagagatcagatacaacaaccatcattctagcgttgtcatctagaaaataaatcgtgcctatattaccaccgtactttttcgcttttacatgccacccgccgaatcggcctttctccttcgaatattcgatggaaaatttaggctgatattctactgtcaaataatccattaatttttcaaaataagtggcagttacatattctttcatctgttccatggttggctgtagatcgattggaaattgctcttgccaagaatttttcatctaatcgcctccttgacctcattatagcaaggcgttagatgtgttggaatgctaaacttggattagcatttaagttcatttctgcaaaatgatgtttttgcagctcaatatgagccgcggctccaatcattgctgcattatcgccgcataagcgtagtggcggtacaatcagtttcatggtaggtaattcctcgctaattgcaaaggacattttctcccgtagccctttattagccgcaacaccgccagcaacgatcaattgtttaactggatacgttttgcacgccttaattgtctttgtcactaaaacctcaacgacacttgcttgaaagcttgctgctaaatttttcttatctaatttttctccgcgttgttcagcgttatgagtcaagtttataaaagcactcttcaacccactaaaactaaaatcaaaattatcttctttgatcatggcacgaggaaaatcatacgtatcttctccttggtgtgccaattcatctatttctttaccactgggatagcttaatcccaatacacgcccaactttatcataggcttcaccagctgcatcatcacgagtctcaccgataatctcaaacgagccatctttttccatataaaccaattcagtatgtccgccactaactaacaaagccatcaagggaaactctaatggttcaactagacgcgctgcataaatatgtcctgccatatggttgattggtaataatggaagtccattggcccaggcaaaagctttggctgcactcaaaccaatcaatagagctcccacaagccctggtccataggtaactgctacagcactgagatcttttgctgttacatttgcttcaatcaatgcttcttcgatacaaatagtaatttgttccacatgatggcggctagccacttctggaacaaccccgccaaaacgtttatgacttttaatttgcgaagcaacaatattggatagaattttttcgccattttcgattactgccacactcgtttcatcacagctgctttcgattgccaagataagttctttttcattcatctgcatttcctactttcaaagacatcagtaccgcatcttcttgagggtgctgataatatttttttcgaattccaatttcttgaaagccgaacttctcataaaaaagacgcgcctctcgattcgaagcacgtacttctagaaaaatactcgctattttctgtgactctgcataacgaatcaagcgtttcattagctttttgccatgtccttgaccctttatttcagaagcgatattcgtaatttcgatttcatcacatacttgatgaaatcccagaaaagcgataatctctgtttcttctgagaaataatggctatgagattgtctcatatcgctgacaaattgactgatcgtccacggagagtcaaaagcatacgcagtttggctgatctcccaaaatcttcttgctaactcttccaactatcccacttccaaacgtttaatcatgtccaaagcatcctcgttattctcagtgtaataattttttctaatattccgtgcagaaaatcccaatcgccgatataaacgctgagcatcggtattactgagacgtacttctaaggagagtgtttcacaatcgttcattatagcgaaattttcgacttcgtcaatcaatagcttaccaatcccacgattttgaaatgcagttgctactgctatattggtaatgtgggtatcgttaccaatcaaacgactaccaataaaccccgcaatagttgattgtctcgttaccatgcagatatacaaatgagggatcggcgaatgaatttctgaaagaaatgcacttttagtccaaggggtttcaccaaaataaacatcacgctctagagcaatcaattctttgatatcttggtcaatgatttctctcaataaaaattcttcatcgcctaaaatcacgcttttagcattgaaagggtattgtttcccataaaggatcgttcttactaatccgctaaattttttcaacatagttttcgtcctctggctgatgattctccaaccatttttcttctgcctccactcgcttcaaatattctggtaccaatccatgaacattttcaacaggttgcgcaagaaaacctagatttcctaaaacaataccattaggcaagttcaactcatccgcttcagaaacttccgcggttggtatcgcagacatgatttgctcattaaacttataggcctcaccaacaaaatacgctggttctttaatctgcttcaacaaatcgattaacgcgatatgctgatcagctaaaatattaactagtctatgattttcccagcgatatgcactcgcgtagacattgttacgacgagcatccatcattgggataattaatttatctgtatgtatgtttccagcaatcaccgccaaactagaaactgtggtcaattcaattttcagtgtttctgctaaagttttcgcggttgttacagcgattcggatacccgtgtacgatcctggacccttggctacgacaatccggtccaaatcagcaggctctaatccgcttgcctgcatcaccgactcgatcgccggcattaaggtcaaactatgattcatttttcgatttaattgaaagtgagctaacagcttttcattttctaaaactgccacagctaatgtttgattggatgtatccatcgctaataatttcatgaaatttcatttcctcgcatttaagatagcaatattttaacacaaactatatttgctttcctactaactgttcaaagatttctgctttccttaaattgacagaaaaaaagccgaacaatcatccactatcatatttgataggaaaatgatcattcggttgctaattgaatttttttcatgaaaattttacagttttgaaaattattttgtagaatctcgttgaatcaatttagttcccaacgtaatttttcgtggtaccggagaaacttcttttgctaactccaaaattgttgagacagctagttcacccatccattcagtttcaactttaacagttgataaagatggagatacatatttcgccacactgacgtcattgaagccaatcacagaaatatcttcgggaattttcaatcctgcttcttgaatcgcttgcatcgcccccacagccaatgcatcactggaggcgaacaatgcatttggatactctttcgtttccattaaaaattttgtcatcgctgtttttccagcttccattgaaaaagcagccgtcaaagtgaattccggtcgatagagattgatttgttctagcttcgttttaaatgcatgcaatcgtggatcttcgattggctgcaagttgtgtttagttgcctctttgccagaaagtatcccgattttttgatgtccttgctgaataaagtaatcaatcactaagttcaaactttggtcaaagtccacgactattgaatttaagcccatattcatcccgtcaaaatcaacaaataataaattatcatcaacttttcttaactgtcgtatttgttcggcatcgaatttgcctaatgcgattgttccgctgacttgagtatctgacaaatcatttagggtttctcggcgaatttggatgtttaactcttcagcttttttctcaatccctaaacgaattgataaataatataaatctgctaattcctccgcttcgttgtaccattgtacaagacggatcacagatttcaccgccttgttagcacgcttatgtttcgtgtaatttaattcctccgccacttcaaaaatgcgctgctttgtttcttgggcgacggataattcttgatcgtaattcagcacacgagaaactgtggcaggtgagacacctgctaattttgcaatatctcgaatagttgccatcgctgcccctttctacaaagttttaataaagcgtgtaaatccttcttgcccttcgacatcccgtttaaaaactcctgcatcttccaaaacgcgagcaaaaactgctcctactgctttttggacaacttgagttacattttcttgtgtaatttgagcatcggcttttaattcctctgcccattttaggtgataatcagcaatatcatttttttcagctaataagtatttttcaacttcttttaactctgattctagacgtggaggtaaaacagccaatcccatcacttcaatcagtccaatattttccttcttaatatgttgaacatctggatgagggtgaaaaataccgtcaggaaactcttcagagacattgttatctcgtaaaactagatccatttcaaataaatcgtcttttcggcgagcaattggcgtaattgtatgatgaggtgtgccatctgcagtttgagctacgatttgcaatgcctcgtccgaataattttgccatttttcaaaaattaattgtgatgcttcaatcaaatcttcttgattttttccttgtaaacgaatcacagacattggccacttaacaataccggctttgacatttggaaaatctttcagctcaaaatttcgttcaatctcggccacagccatcggaaaagtatgtcgcccaccttggtaatgatcatgagaaagaatagacccaccaacaattggcaagtccgcatttgagccaacaaaataatgcggcaggacttctatgatttttaacagacgtcgaaaagttgcttttgttatcttcattgggcgatgttcttccgataaaataatacagtgctcattgtaataagcgtacggtgaatattggaagccccagctttcgccatcaagattcattcgaataatacgatgattggtccgtgcaggataattcattcgtcctttgtatccttcgttttccatacacaacatgcaatctggataattgacttgcttcagttgtctttctgcggcaatttgcttcggatccttttctggttttgataaattaattgtaatttccaactcaccgtattctgttttagcaggaaaaataatattacgagcaatttctcgagttttgatataatcattgtctttgcttaacttgaagaaataatctgtcgcttggacaggatcctttgaatagtactgagcgaaataagcatttacaacagagggtggtggagtcatcaaatccatcagttgagcttctaacatatctctttcagcctgtaaatccttaattacttgattcttttctgcttgaactaaaagttgatcgactaattcaactgcactctctgatactatgcgattttcggcttttgataaggagttctccccaatcatcgcaataacccgattttctaaatataaacgatccatctccatccaaccgcctgattgaatagctaaagtaacaaaatcttttaccgtttgactgactgacacgctacttcctcctaatcctcatatccatgcggatggcttacgtgccagttccacgctgttttgataattgtcttaatatccgtatattctggttcccagcctaacgtcgctttcactttatcactggaggctaccaaacggcttgggtcaccagcgcggcgcggaccaatttttgcagcgatttcttttcctgtaacttcacgtgccgcgtccagcatttctttgactgagtatccattgtttgaaccaagattgaagaaattacttggatttccagcttttaaatactctagagcaaggatatgcgcagcagctaaatcctctacttgaacgtaatcacgaatgcatgtgccatctggtgtatcatagtcatcaccaaaaatggttagatgatctctttgtcctagtgctacttgtaaaataatcggaactaaatgggtctcaggatcatggtcttcgccgatcgtcgcatccgcttttgcgccagcaacattaaaataacgcaacgcaacgtatcgcataccataggcgttatcgcaccacttcatcattttttccatcattaatttactttcaccatatggattggttggatttgtttgaatctcttccgtaattggtgaaactcctggctcaccatatgtagccgcagtagaagaaaagacaatgttcttcacgtcaaactcttccatgacttctaataggctttccattccaacaacattattgttgaaatattttaacggtttttcaaccgattcaccaactaatgagctggctgcaaaatgcacaactccctcgatcgattctttcttgaagacatcccgcataaatgccttatcgcgacaatccccttcataaaatttcgcttctggatctacggcttcacgatgacccgtcaataaattatcgactacgacgacatcgtaattttttgaaattaatttatcaaccgtatgtgatccaatatatcctgccccgcctagaactaaaattgccatttaatcgactcccgtcttttctgttttatttagtaaacaaattatagtttgtttactaaataaaagcaagtgaattttccgttcgttaaactttctatttttgcgtttttgcttcataatgaagatataaagagaaggagtgatgaaacgatgcgtaaatttgcttcaggattcgttactggtactttagctgctgcagcagtagttgctggtgtagtgatgggcgtgaaaaagaaagtcatcgacccaattgaagaaaaaaaatcaaaaatcgatgaaaatcgtaaaaaagctcgtagaaaacgaattgcacgataaaaaaagaaagccgcggctttctttttttattgataaagtgcattaacaatttgatttgctaaataaaatacccgatcatcacttttcggacgtggtgaagcagcatttaaccaatccaagccttcaagtggaatcccatagcagaatatgttcgataatatatttccctcttggtcaatcacctgatgtgttttacgactgacttgcaatgctccagtaggatattctttcccttcaatttctacttgatgcggagttatataaccttttttacgcatctgaatcaacaaggtattcgttgtgcgttcgaaactagtcgctggcaaacgagcttcaattaagtttttacagctatatgactgttcgggtgcctttttgctaaaagctaagaaggtgccatcttttctttcaacagtcatttcaggtgcaagaaactcaataaagccagccttgaccaaggctaacaactgcttttgtcgaatcactggtgcaccaatcgtcagaaaactatagttacgattgaagcttccaaaaaaatcttcaaaatattccttcggcgaaaatttatcatgatccaacatatagttaaaggggttctggatttctttataggtatcaattgttgcagccaaagcaccggtcaaatttcctaattctgcctcgttaatatcgttttttaaatagttttgaataaattcaggaaactctcttggcaaaacattttttgtgggatcgaaaagcgcatcccaatctaaacggtcttcagcagaaatttggtatttttgcaaaactgtttctcgatcaccatcacgatattcctctaaaaaattatctaaaactacttcggactcagtcaatttcttttgatagaaaactaactcagcttccttttttaataaatcaaacaattcttgcgcactgccagaaaaccgctccataaaagcttgggtcagaatctgtggctgcgcgtcctctccggctttcttctgattattaggtcgagcatggtagggtaatcctctgcccgaaccgactatcaaatgctgttccctgccagaagcttcatactccaagcaaccctttttatcaatgaagcggccactccatttagcaacgaacaacgcaatataatcaaaaaagctcaaccccaatcctctaagaattacatcgccttctactaaatgatccagctgagtatcagaaggatttcccggtccttgataaaaaagattattttcttttgcatagctttgattttctgcttctttttcactcagatagtttcgtgaatgtcctgttgctaaaatcacatcggtcacttgatagatatgggaagcctcaagcactatattattttcttctatagtcagatctactactttttctttcattaattcgacagtgatgttttctggcaatcctttttttaattcatcgaaaaaccagcattgatagacaccgtaatagcgacgctgacaataatcgttttcacctaattcggtctctgagagaaacgttttttctagatcaaaatcagttaaatactttaatgcttcgtcttgattccattctgctaaattcggtccttcatcttcagaaaatagagtcacatgttgcattacagtgttcatgataacctgatcgctttgattttcacgccaaatattacctcccggtccatctggatcaaaaagtaaaagttcaatcttttcattttgaggagcttgtttgattaagcgatccaaagcaatcaatccatatgggcctgctccaataactgcaatttttttcatacatattccccattttttcattcatttctttaagagtagagaaaatttgaggaataagcaataaaaaaaaaagcttctgatgaatatttcatcaaaagctcgtagaactattttaacacccagcgatcaaaagcttcttttacaccgtcttctagattggttgcaacagtataatctgcagctgctttaatcgtttcactggcattgcccatcgctattccagttccagcaaattcaatcattgaaagatcattttctgcatcaccaatggccatcacttcagattgtttgattcccaaatgttcactcaactctttcagcgctatccccttactagcattaggatttaatacttcaagaaaatatggcgtactgcgaacaagtgtatatctttcaaagtagtcagctgggatttttttgaaggctttgtttaaaacctcgggatcgtcaatcatcatcattttaatcggcaatacattttctgcagcaatttcttccggtgttcgataatgtaaaggcatatttaccaaataggattctaaaatcgtgtaaggactaatgtcacgattagatgtgtacatctccttcttatctgctaaatgtaggtgaacgttcagcaagcgtgctaaatgatcaatctccaaataattttcgcgagtcaagccatgttcagctacgatatcccaagtatttgtattcagaactaaagcaccgttataagtaataatataatcatctatattgtttagtcccaaaacatctaattgcgctcttgttcctgataatggccgcccagtggacaaaactacatagacacccgcttcgcgcgccttcttgatagcgtcaactacaggctgattgatttcatgatgatcgtttaataatgtgccgtccaaatcaatggcaactaatttgatactcatatatttctcctaactacttctaaatttattgctgtaaattaacttgtttaggctatctaactgtggacatatttctttcacttataaactcaagtgactcaacagtgttttgattttaacagacaacgtaaaaagttccagctttcataataagcgtaattcgcttttcagtcaattttgctaaagagacattgcaagttttgtcgcccttattcataatctgaatggatataactatgttaattaatcatttctattctcacacaaaaaaacggccagatatttatccagccgcttttttattaatcattctttttctgtttaacttttccagtccattcctgcatgccgcctttaagaatgtataaatccttgtacccttttttacgaagcagattggctgcacgagcgctgactgccttattatgatcataaatatagattggttgatctttccgcaaagaactaaaggtttcttttaacatgctaaacggaaaactacgagctcccaaaatatgctttgcgttgaactcatcgcgttcacgaacatcgatgacttgagctttccgcattcctgcttgaaactcttcttgcgaaataattttcgcggaacgtctcatcatgatccgaacaaataattcatatagaccaaataaaacaatcaccgaaattaatacaatatttatcttccaccaaattgacataccttgattcccctcttaccttttctctattttgctaatgaagccgccccaataacaccagcttcatttcctaattctgctaatttgattgtagtactttctcgtacttgtgggaatgtaaattctttgaaatagttctcaatacggctgcggagaaattctcccgcagcagaaacaccgccaccaatgataattgttgaaggatttaacgtattcccaagatttccacaagctaatcctaaatagaaagttactttatcaactaccattaaggcaagatcatcattttctttttcggccaattcaaaaacatctttacttgtgatatcttcaccgttatccaaacgcgcttttaattgtgagccgcctgcatattcctcagccaattgacgagcaacgcgtacaacacccgtcgcacttgcaactgtttctaaacagccacgcttaccgcaggtacattcaaaaccattaggatcaacggtgacatgtccgatttcaccagcacagccagcaattccgtgaagtagctgaccgttcatcacgataccgccgccaacgccagttcctagtgtcataaagaccacatctggttcgttgtcgccagcacccttccagcgttcgcctaaagcagcgacattggcatcgttatcgatactaaatttgatttttgttcctttttcgatctcacttttaacatgttgcaaggtcgtccagttcaaattgtaggcgccaattactgttcccgcctcgatatcgacactgccgggagtacccatgccaattccgataaactgttctggtgtcataccatataatgataaatgatgattaatagaatcaataatatctggaacgatatgtgaaccatcatctaaaatatttgtttcaatactccatttttgctgtatctccccggcttctgtcaaaatcgcaaattttactgttgttccgcctaagtcaatacctaataattttttatccactctagtcaccttctcgactttcttcaatgtgatgttcccgttttaaaatgccccaagcctgcaaataagtgtctcgatcaattacacgactctcatacaaatttttcaattcgatttgcatcaattcgatatcgtaaattcgtttaccaacgtaaacataaataccaaattgttttagcagttgctgcacatcatataaactttccataaaaacacatccctagtattatacagaaaaaagagctctttttatagcctaatttctatttcctagcttattttttaataagtcatctagtccaccattcattttatagcattctcttaatagtcgcaaatcagtcatgaggatttcaccagacctgtgcaaactttaaaaaaacaccatgcaaaaaaattgttctttaattgtagacaagcttttcttcataacgtccataagaaaacctcaggagaaaaccgctcctgaggactttttgtttagatttagataaatcattttattgtcgatcactgattctaaattcgtatccaagtacgttcttatagtattctggatacatctctccaccacatttttcgcaatcaaattgcggagcgttctcaggatcaaatgcaacatctcctgcatccaaaaattgaactacttcctttggaattttttcctttatcccacattcaagacaaatgtaatgaaccactccattggaatcgaagttttttaaaagctgcttctttttctttttcatacttacgtttcgatgcttcttccccaatttttttattctcctctcgcatgaatcgttccgattctttattcttcgcatatttcactacaagtcgtccatttttagacacactaactccactaaattcataatattcgccacatctagtacattccaatggatttactccgaattcttcggctattcgttcacaccatgattttggtttaagtgctttcttcacattcacaagcattcgttgaatctctttctggtaattacttaatacttttttcatgattgtcttgatccgccgactataaatgccgtatctacgaattgttttgaactggttctctggaatatgacgaatcagtgcaccaataaattcctctgccgacatcgtctttatcttatccgtgttagttcgtttatcatgatactgaaacatcactattttcccatcgtacaaaaggatacgatttaaagcaatgggaccacgtttcatataacgactgatatattctaatatctttttgagagaagttcggctccttttgggtgcatgcacgtaaaaaccctctgcatttttcgtgtacgccgcttgtaaaagcggctggactcgtgccttatcccattgggataaggttcttcgaatgagctttaggaccgcattctgccaatatttcctcaacattgcgaacggaaaatagtcatagtccttccattttccatccttcgtcagtccacccatggtgacgactaaatgaacatgcggattgtattctagctgagaaccgaaggtgtggagtgttgccacaaccccagcttgtatatggtgctttctaaaaaaatctaatagtatccgtgcagcttcatccattaatccttttaaaagctccttacgatacttctccttcagaaaaatctcacgtaaaccttcatcgatcgtgaagatgacgtgtcgatgcgtcactgtaaacagatcattcgccgcaacctctgcccaccgttgactttccccagttgcacaagttggacaaaatttccctttacaacgaaaagccactttctttacatcatggcatccttcacagacaaatagacgataaccttttttaaggtcaccacaatcgcgaaacttcttcacttctcttttcacaacggatcgaatccttcttgtgtacctttgattgaatttctcccagttttgatattcatcaaagaaaatggcgtgtaaaatattgggtttcatatctccagtttaataggaaaaagaccagatgaaaagcggtcaaaagattgatgtatcaatcctttgaccgcttaaaatgttatacttcctttaatgtttaaaaaaagcgaactacattcgtccgcattattgatacatactaaattttcttaatccaaaaaatacaaaaatgaccaccgcaaaaatgaagaataaaatggaggtaactcgtccacgagttgaaaaacgatcctgtgaatatggaactgctagtgcccaaccagataacgccccaccgataataccgcctaagtgcccccagatatcaatcgttgaatcaaacagaccaaaagcaagattcatcaaaatgaaaagggcaaattggcgtgtcaaggcctgaatcgctccattatcacgataatgcaacccgactactaaaaaggctccgaacaacccaaaaattgctgtacttgccccgccggataatgtcgtaggctgattgaatgcaaaactagcaaaatttcccatgatgccgcttaataagtagattattgcaaaacgccaatgaccaaaaatagcttcacattgttgtcccatataatacagaaccacgccattcaaggcaaaatgcatcaacccaaaatgaataaacataggcgtgataaagcgccaatattgttgctgccaaatgattgatggtgcaaacattcctaattgattctcgatcgatagtcccggtagtaaatactgcatcagaaatacgatcgtattaatcgcaaaaaacgtatacatcacataaggtctatcttttctcatatatctacctctctcatttttcgtctttttttgttacattgaaagaaacaattgctggactggttgatcaaaatcttctacctgccaggcttccattaattgttcaacaaaaaccagactgcaggtttttcctttgtaatttgccaaatagcgatcatagtagccaccaccaaaaccgacacgatatcctgcacgattaaatgctaatcctggaacaatcaataaatctaactcattagatcttgcaatgtcttccgtttcaggttcagccacgccaaatcttgttgtgtaaaataccgtatccgtgtctacccaatggaaaatcatctctcctttaggcagcgacttaggaacagcgactttttttcccgtctcaaaagcacgttgaatcaccgatgaagttggaaactcaaactgagttgacattgtaacaccaatgctggtagcttctttccaagcattactttgaaataatttctcaagaacgcattcaacttgattcattcgctctttgctatcagccaatttttgcaaacgagcaatcgcacgttttctaagtttctctttctccatacatattcaccttcttatctaaaaatactaacaaaatcgaaccaaaataaaaagaggattactcccctttaacaaaatcactagaaatttgacgcgcgatagctaatccagcgactgcattgaagtgcaaatgatcaccgctatcaaataatgaatataaatgtccagaagcttcccccacaatcttagaaaaatcccaaacttgtcgataattatcgagcaaccactgatttatttctttacgcaggttctcttttgtttgattcattccaggatagcccaaacacggtgttaatgtacacaattggtagtctaccccactgacgttgcaaagatgaatcatttctctgattcctgttttgaaagtctccagtgtaagttcaccgttgattaggtcattcacgccaagagataaaagaactttgctaacattgctatggctaagcaaacactcttccaatcgacgtaatccaccaaaaccataaaaaagattttgtttctcagtgttcgcgttatcactgcttggcttcaataagcagctaccatttatcccttgattaactaaataagtattttgcttccgcaggtttctttgcaatggcgttgtccaagtagcgccttcagttaaggaatcccccaaagcaataatacattttccatcgagctctgcctcaatcgctaataatcctgaacaaaaatcgatttttttcgattctggcaaaaaatcagcatcattataggcaaagccgctttcaattgaagtaatatgaaaagtgagctgccatgttctcgcactaggatcaatcaaaatagattttgtcttgaaaagttcatttggagcaagcgaaaagtcagaaataaactgacaacatttatccgtttttactgataaattttgaaccttctgtgtttgctgaccatattcatttgcaaataccaaacgaattttcttaactggggcaatttgcttcaacgttagattgatcactccttctgctatactgtgctgagcgattcctcgttgtgcatgactccatatcgtagtccaaaccatccaatctctcctcatctttcattacttttttttagaagctttaaaatgaagtatggagcgcctatcaaagacacaataattcccgccgccatttcaccatctgggagaataatcctagccaaaacatcgctaaatagtaacaaaataccaccaatcatagcagtcatcagcaacgtttgattattttttcgtttaacggactgttgagcaatatgagaggcgattaatccaataaaactgatactgccagcaatcgaaacactaacagctgctaaacaaactgcacaaattaaaaagaacaactgtgttcgtttcaatttcactcccaggccaacggctatctcatctcctaactccaaaacctccaaagaacgtccctttaataatagcaaaggcactatacaaatgatccaaggaatcagaagtaaaacatgccgccaagtcgttccccaaatcgttcctgccagccaagctgttacgaattgataattatctttagaaactcgtatagtgcctatcaatgttaaggccgaaataccagcatttactgcaatacccgctaaaagcagtcgattgggagtaatacgctttgattgacgcccaaaataataaaccaatcctgtcgctgcaaaactaccagcacaagcaatcagtggtaaaaaccagctggtttcgcctgatgcaaaaaagcctaaataaatgagaactattaaaccagcaccagcattaattcccaaaattcctgggtcagccaaatcattgtgtgtgattgtttgaaataaataacccgatactgctaaacccatacctgctaatatcgacactagcattcgaggaaatctaaaatcaaaaacaattaattgttgtgcagtcgtagcagttcgatgaaaaacttgcaacagttcggatattgttaatggaatcgtccctaccgtaagactgagtatcatcccaataatcagtaaaagaagcactatcagccaactaatttttttcttcataagctataagcttcccttcctaatttgtaaaagtaaaaacggtactccaataatcgtaataattactccagccggtgtttctaaaggtggtgcgattaaacgggaagcaatatcagctataacgaaaaatagggcaccaaataagccggaagcaggaatgacataacgataatcatgtccgacaaaaaaacgaacgacatgaggaactatcaacccaatgaaaccgattgttccaactaaagctacagaactccctgctaatagtaaaacaagtaacatgcttagttgtcgaatccgactgggatttttccccaacgaaattgctgtttcatctcctaaactcagtaacgtaatttgtgggctgattaaacatgtaccaataacacccactacaattactggagtgattacctgcaattgattccaagtaagattagacgttcctcccacaaaccaaaaggtcatatcttgattcagatcaaaaagcaaactgatactttggcttatagctgtaaaaaaagaactcaaagcagcacccaataaaataattcggactggagataatccaaatgagattttagttgaaactagataaatcaaaaacagcgagaccgaggctccgataaatgaacctagcactcccatagttggtgaaggatttgtattgaaagcaaaaaccaaggcaagacctagacctgctcctgaattgattcctaataacccagagtcagcgattggatttgaagtgattccttggatcaatgctccagaaatagcaaaggccgctccaaccgaaatagctcctaacatacgcggcagacgcagatatcgaatcaattgttccccctgattattcgaatcaaagtgcagtaaagcctgagtgacatctgaccacttgctggtaaccgctccatagcgcagggaaaaaaacatagctactaatagtaacagaaaaacaatcggaaaaaagtattttcgttttgccatttctagtgctcctttactaaatcataagcaagaactaacggtttgtcgctattaggcatcgtggcaaaggttgcttgaatgtcaaaaagattcaataatttctctgcagtaaaaatctcctttggtgtaccttgaaaaatcaactcaccatttttcattcctaacaagtaatcggagaaacgcgaagcatgattcaaatcatgaattgtcattaagattgtttttccctgacgattgattccttgtaacaactccaatatttctaattgatgagcagggtctaaaaaagtaatgggttcatccaaaattaaaatatccgtgtcttgagctaaagccatagcgatccatactcgttgctgctggccaccagataacgtaattaatgtccgctctttcaattcttgtagattcgttgcctctatcgcccaattaatcaaatgatgatcctgttcttttaagcctgaaaaacctttctgatatgggaaacgaccataggcaactatttcttcaacagtcagcccgctgatttgtgtactggtttgtgataatgaagcgattttttgtgcgactgttttggtatctaaacgttgaatattctcaccgtcaataaaaacttcacctttggcaggctcaagaattcgagctaaggtttttagtaaagtcgattttccactaccatttggaccaatcaaactagtgatctgacctttagggatttctacggtaatatcgtttacgacaatttttttatcatacccgattgaaagatcagtggtattcaattttgtcatagactttcctcatttctctgataatcgttctcaattatgagcttatttgttatctacgtcaactatcatttagaaaaaattacggttgacacccttatgtctttcagtaataatagcaattgagaatatttctcaattaacttcaaaggagtttttttatgctaaaaaaaataattttaggtacattttctctgctggctttaatcagcttaactgcttgtgggcaaagcagtgagagtaaagataaaaacaatgacgtgcgaacgatgaccgatgcgcaagatcataaagtgaaaatccctaataaaccgaaacgtatcattgcctcctatttagaggattacttagtggctctaaacgaaaaaccgattgctcagtggacagtcggtgaaggaaaaattcaaaattacttacaagatgaactaaaagatattccgactattaattacgacttaccctatgaagctgtattgaaatttgaacctgatctgttattaattggagcaaacgggtcacttgaaggcggaaaatacaaagagtattctaagattgcaccaacctatgttgtaaaaaatggtgggaacgtcacttggcgggagcaattagaagatatcggcaacgttttggataaaaaagaccaagccaaaaaagtggaaaaagactatgatcaactcattgaccaaactaaaaaggatctgaaagagcaaatcaacggcaagtcagctgccgtattatgggtaacaaataattcagccttcatggtagcggataatcgttcaagtgggcaactactatataaagaacttggatttgaagttcctcaactgacaaaagatatcagtaaaaaagcaacggcagatttttctcaagtctctttagaaagcctgtcacaacttgacgcggattatattttcttagtcaatagcgattctggtgctgcgatgtttaaagatccgttatggagcaatattccagctgtcaaaaacaaccgactatttgaatttgatggagagtcaagctggttgtacaatggtcccatcgcttatacaaaaatggtggaaaatattcgagatgtcttaaaataaaaataccgttctgatcaaagctcattctatttagaaagcggctcttgatcagacggtatttattttttactacggcgagttcgtgtagtgctttcttctactctgactaaaaattttaagcgataaggttcatggtatcgtatgccctccttaacaaaatctccaccgacgataaataatccaatcggttttagtggttcgacatgtcgaatggttccaatcgtttccaattcacgataatttctaccaatctgtaactgatatatccctgtatcgacttgcttaacataataatagggatacaatgtattttcgtcgattaaaaatccttcttctttagaaagatctcgcgttacaatctcttttttatcaattagtgattggatgttttcagcgagttttaattgataatcttcattgaagtcaactgaaatttctttggcctgaccaaaaactttcttattttttctaggttgttcattttgaatattgaaggcatcatccggtagatatttaacaaaaagctgtgtaatatctcccttcacatttctatccaaaaagtaataaaagaaattcaaaacgaagaaatacactaaaacaataaagattaacccatagagtactaattgcagatagttttgattaagccacaatccataaacaattcgtaaaatatacacagttggaataatactcaacaaagtgtatgctcgatttgagtacttcggactgatatctaaaaatcctaaaaacttatttagcccattaataatatctaaaagtatcgtcattgattaccacctgcttctgaaccaattggagcatcagctggctgctgtgtgggcgtcgtctgcgatgcctccgttgaggtttgagctgttacagagctgctttctgttgaaggttgtgtattttcaacctgattgtttccagccgtgctttcttgaatagtattattagccttcgactcttcagtcggtgtcacttcatcggctgtacttgtttcattggtaatgctatttagatcacgagaagaatcggtcgtaggattcgtagattctgtcgtcgaagttgtcggtgtcgttgctttaacctgtcgataactcgaattatttaaaattcctgtagtcgtcgctatcaagattgacagggtcagaagagcgattggctttaaaatcggtggaactttacgcattggattcttcctttctatgtttagtttatttaatacttagttttagcactggaaggttagcttttgtttaggattctgtgaagatttcatgtagatttctgaaaatgatttgcgactctaacattctttataaattacccttagctaaaatttttactaaaagcagatagactcatctttacctacggatacaattatactgataaaaacggttctataatattttgtgttggtggaaaatcgaaggcgattttctactaacacttttttcttcgtttcaactcaaaaagagactcacttttggtaaaatttagtcgaccaaaacgtcaccctaccaaaggagtctctcaatggataatcatactagaaaattactcggattaacagataaacatttattttttgatgaagaatggctgattgaaaaagaatataaaggcgttcaagcgcagtttattaaaggaaaattggatgactctccttcctgttgtgaacactgtcgatcggttcgtattatccgcaacggttcctatacgacacgcactcagatgttgaaagtcaaagaaaagttaactattttagaattaaaacgtacccgttttctctgccatgattgtggacggaccttttctgcgaaaacggacttagttgatgaacatcatcaactaacaaaggaactgaagcaggcgattctcatggaactgtacgaaaatcaatcacgtaaactaatcgctaagaagtacttcgtctcggatgggacggtgacacggatcttgcgtgaagcaacgaagcattaccagccacgtatgaacttccttccgacggtgttgtgtatggatgagttcaaatcaatgaagtctgtttctggttccatgagttttatttgtgttgatgggacaaccaatcagctatttacgatccttgaagatcgcagactttacaaactaactcaatacttcctgcgctttcctagaaaggcccgtttaaaggtcaagtacctagtgatggacatgaatgccagctattgtcagttgcttaaaacggtctttccaaatgcggagatcgtaactgaccgctttcatattgtccaacacatcaatcgcagcttcaatcaattacgtgtccagatcatgaatcgttttcgaacctcacactctgaaaatcagaagaagtaccgtcggctcaagcgatattggaaactcttactcaaagattccacgacattggagccactcaaacggcattatcatcgactgtttaaacgaccaattagtcaaacagaaatcgtcgatgaactgttaagctacaacgaagaattgcgaacagcgtatcatttttgtcaattattacgctattatttcgttaaacgagatacggaaggctttcaagaaacccttaaaacaatttcatctacgttacctcagtcgtttaaaaagaaattcacgatcttccatcgctaccaatcgggcatttcaaatgcctttaaagtgtcccactcaaacggtgtcacggaggggctgaataacaagatcaagctgattaaacgaattgcgtttggttatcgcaacttttataactttcgggcacggatctatttacaacaaggtctgatctttgaaaactaaaaaaatatgcggcgcacagaacgcgccgcatatcggactaagttttattcaaatttgtcttcaccaacacgatttgacgaagagccataaaaacgtgtaactttaaaaacacaaaaaagccagcaatcataagtgatcgctggcttattgatatgactattttacttctttatgcaaagtaaccttacgttcgcgtgggcaatatttcattttttccaaacgatctggattgttacgtttgtttttattagttaggtagttacgttctttacaagaagtacattctaaagtgatatttacgcgcatgattttccctccccagttaagatcagttttccaagatatttctcagactttgatatcatatcatgtttttattttcttgaccagtctttttgtcaattttgttaagtagttctacttgacgtttttaaagttgggcttcaatatcttttgcaatatcttctggctttgtttgtgatgcatagcgttttattacgtttccctcacgatcaatcaggaattttgtaaaattccatttgatagctttgttaagtaaaccaccttgcgcactctttagatagctatacaatggggcttcattttcgccgttcacatcgatttttccaaatgtttcaaacgtcgtatgataattcatctgacaaaaatctgcgacttcggcattggtgccaggtgcttgatttccaaattgattgcaaggaaaatccagaatttcaaagccgctatctttataatggtcatacaagttttgcaatccttcatattgcggtgtaaacccgcatccggttgctgtattaacgatcaataaaacttttccttgataatccgctaaagatttttctgtcccatccgtttgtttcacttcaaagttataaactgtcatagtgtctactccctttcatacaaagtccatttatcctttttaggaaaatacttttatgctatatttctctcaaaactatggttaagaattctctctactcttctttcacaagaataatagagaaaactaaacaaataaagctaaggagcaaagctccctagctttattgtacgccatatgtgtctgcaaatgcatttattatgtcttttgcaattgctttatttgtatcgtcatgctcttcgtctaagtttggcagcatcacactaatagctatttgtggtttatcgtggggagcataggcgacgatattactgttaatcgtattaaccgcctgaccgttgaccgatacaactgtttcggctgttccggtttttgccgcaggatcaagttttgccgaagctaagtctctagccgttgtataaggatcacttccgtgtactgcctgataaaaaccttgcttgataatccccatttgctctgctgtgatattcacttgatccagttttttgccagtaatctcttgctgcaattctccaagaccaccgctgtcattatttccataaattcccttaacaacatgcggagcaattctagtaccgccattcgcaacagtggacgcatattgtgctaattgcatgggtgtatacgtatcatactgcccaaatgacaggtcaagcaagtttccgcccccaggagcatgatccgttccaaagtcttcattaactagcccacgcgtttcgtttggcaaatcaatttgcgtcttcacgcccatcccgtattctgcaaaagcgttacgtaatttatcgtacatttctttagaagaggcgctctctggtaaggacatttcttgttgatattgaactcctagcatacgcaacacaatttgcatcatataagcattagaggaccattccaacgcttttactgtattcaatggaatttgatttcctaatactttattataaatcgacccttttagcgctgtaccggataatttaatcggttgatcaattaatgtgtcatttccagtaatggcacccgtctgataaccagcggtcaccgtaccggccttcaccacagaacctggttcaaacgcgctggtgattgtccctaatgtgttttcttctatctctttgctgttcacatcatgtgtaaagccagtcatagctaaaacttcgcctgtatttgggttcatcgctacagcataggcccctggagaatactttgcaacaccactatcaactaaaccttgataatgctttttcagaatatcttcgacttttttctggaagtcgctattaatagtcaaaacgagattcgatcccttttcacctttttttacttccttttgtttttcaatgtttccttcactgttcaaggtgaccttgtattcacctttcttaccttgaagctgctcttcatattgcttttctagatagctcttgccgacacggtcattccttgcataaccttttttcaataattcgtccgcttcttcggcaggcagtccttctttttccgttgtaattttccctaggatacttcttaatgaaccatctaaatcctcattataagaacgatcccagtcagtacctgtagagactcctggcaaatcggaggcacgttcagctaccactgccaactcctcgtctgtcacaccatcatttttaatgaatacagtgctaagcgcggaggcactattcattcgtttaaagatcgttgcaattttcaactggtcttcggtgaattgaatttcactatctttaactttatctacaagtttttggtattcatttgtattatcaagatttttttccttaaaggataaccgatcctcggcttcttttaaatgatccttatccgcaagccaatagtcctttttgtcgcgggtagttagattttcatcagccggtacatcgattaacttatccaactcaatcgctaacttgagaatatctgatgcttccatttgattaccacgggtaaaggtgattgctgggttagccttattattaactaacgctgttcctttagcatcataaataaccccacgtggtgcattttctttcacagtgattgtggtagaagccttcatttcggctttcattttatcgccctcaacaatttggagataacctagtcgtgtaaccaaaataacgaataagccgaaaatcacaaaaaatagaaaattcaacctgaatggaatatgactcttattttgattacggcctttttcatccgcaagttttaatttctcaaaaaaattcttaaatggattcgttagtttcattcatctgttccttccactttgacagttacttgtcttattgtagccgaaaaagtgttttttcaaaaggattaatcgtggttcctttaatatagtttaagaacttccgcttactttaccttgaaaacagtaatgtgtttcacgagcatacaattatttttttaaacaaaaattaatttagcttaaaatatggtttttcagctaattacaaatccttcttttgtgaaacattaaattcagcgattttctgtggaaaacttttaaaaataaaaaagcgtctattacgcattttctttaaaaagttttccacaaatggttcgttctctcgtttcccataaatttgagcttattcatttatgataagactatttttccaatttgaacctaagaaaaaaccggtggaggaacccaccggcattttcttaattacgactcatattgtcaatgtctgctttaatagcatctacgaacatattcaaatcctgtatctcttgttcctcactaccatagcgacgaacgttaactgtcgcatcattgacttctttgtcaccgattactaacagatacggaatttttttagtttgtgcttgacgaatcttatagccaagtttttcattacgatcgtcaacttcaacccggacaccctcacgaaccaaacgatctttcacttcatacgcataatcgccatgatgttctggtgatactggcagaattgctacttgctctggtgctaaccaagttggaaaagctcctttgtattgttcaatcaagtaagcagtgaagcgttccattgttgaaacaacactacgatgaacaacgactggacgatgttcttttccatcttcaccaatataagataaatcaaaacgttctggtaataggaagtcaaattgaattgtcgataatgtttcttcagtccctaaagccgtttgaacttgcacgtctagtttaggaccatagaaagctgcttcgccatctgcttcaaaataatcaaaaccagattcatccataacttctttcaatagacgttgagaattttcccacatcgcatcgtcatcaaaatatttttcagtattttcaggatcacgatagcttaagcggaaacgataatcttcaaagccaaagtctttataaacttccaaaattaagtccaatgtacgacggaattcttctttgatttgatccggacgaacaaaaatatgcgcatcattcattgtcatttcacgaacccgttgtaaaccagacaacgcaccagatttttcataacgatgatccattcctagttcagctaaacgaattggcaattcacggtatgagtgaatatgatttttataaatcatcatatggtgtgggcagttcatcggacgaagtactaatgattcctcaccatctcccatgtccataattgggaacatgtcttctttgtaatgatcccagtgaccagaagttttgtatagaccagtatcggctaatacaggagtataaacatgttcatagcccattgagatttctttatcaacgatataacgttcgatgattcgacgaattgttgcgccttttggcaaccagaatggcaagcctgagcctacttcttgcgagatcataaataaatctaattctttacctagtttacggtgatcacgttctttggcttcttcacgcatttttaagaaatgatcaagatctgcttgtttgaagaatgctgttccgtaaacccgttgcatcattttattatcggagtttcctcgccaatacgcaccagccactgataataatttgaaaatcttgattttacctgttgaaggcacatgtggcccgcgacataaatcagtgaattcaccttgagaatacgccgtgataacttcatcttctggcaaatctgtgatcaattctactttatatggatcataactgaagaaatctaacgcttcctgacgactcattactttgcgttcaatcggcagattttcttttatgatcttcttcatttctttttcaattgcagggaaatcctcttcgctgatttgttctccatcaccgttgtcagtatcataataaaaccctgaatcaatcgccggacctacaccaaagtgcatatttggaaataaacggcgaattgcttgtgccattaaatgcgcgcttgaatgacgaactagtggtagtgcttcttcatcttgttcagtcacgatttttaattccgcatcttcttcgattgctcggtttaaatcttccaactcaccgtttacaacaaccgctaatgctttttttgccaatgaactagaaatgctttttgcgatttctaagccagtaataccgttgtcaaactcttttactgatccgtctggaaatgaaatttttaccatcctatgttcccccttattcgttttgattgataaaaaaagtcctagtaccgaaatcggtactaggacgaattaacgtggttccacctaatctttggacagatttcctgtccctcgcaagcgataacggcgctgtccgctcctgcatttaacaagagtcttctgaaagtggtcatcccttgcgcttgtctggaaaaagtttcagccgagcttttcctctctgttaaacagccttcaagttcaggtgtctttcttcatcaatcaattacaaagtcattataaacacttattggattgaaatgcaagtataaataggaaatcttatttccatttaccaccttgtgcatatttgcccttttgcatctcattaatgataacatgaatattttcttttggcgctcctgctgttcttgaaactgcctcagttacttcctccaccattttagtcaattgctcttctgttcttccttcaattaactcgatgtgcacgaatggcataataaatcgctcctttaacatttgtttttatcgccttattttatcatatttcatctaaaaacatggtgctacagattaccttttgctaacttaaggaaataattgcagatgattaacgaatcagagcttattttttatacatagaaaaatttttaaattagcaaaaaagcttctaatttaaccaccctgagcagattcacgacaactatttcagccattcttcaaaaaaatcaagcatctgtctcttcagtaagtcaaattactattgatagccctttcttcgtgttaaagtatcagcataagaatggaggaaaaatcatggatatttacttgcatttcaaagatcaagctgctgaagtaatcgccttttatgaaaaagttttcgaaacagagccagctcaaattatgacttttgggcagatgccccaagatgacgagcatccgattgatgatggtctcaaagatttagtgatgaactccaatttaaaaattaatgacacgaatgttatgatctcagacagtcctgaaaatttggcacctccaataattgtggggaacaacgtggccttagtatataatgcgaaaacaacagaagaagctacagatatttttcagcaattagcagagaatggtactatattgctcccgcttgaaaaaaccttttgggcagaattatatggaatggttaaagatcaatatggtgtaatttggcacatcaatctttattaaaaagaggaggaaattccatggaacagcaatttggctgttgtctctggtttaacggacatcttagtgaagctgctgacttttattcgtccacctttgaagatagtaggattgtgaatcaaacacattttattacagatgagcacggtgaaattggtgacttattaacgattactttagaattagccggctgcgaatttcttttattgaatggaggggatgatttctccccgtcacctgcaatctcctatgttgttaattgtgaaaacgaagaacaacttcttaatgtttggaaacaattaaatcatgacggtgaaacattaatgccactgacagattatcctgagcttggcaaatttggctggacaaatgatcgctatggtttttcctggcaggtccgtttgggagaaaacttgcaaacaatcatcccttgtatcatgtttgccaacaacaattatggcttggctcaagccgcaattgatgaatggatcgccatctttggtggaaaacagacttttgtcatcaaaggaaaagaagaccgtctgcgcgcttcaggatttcaattacgcggtcacgatctgattattatggatagcccagaaaagcatacttttacttttacgatggcaaattctttttacttctattttaaggatcaaacggatattgataaggtatgggaggctcttacgtatgatggcaaggaatggccttgcggctggatggaagatcgatacggagtcttttggcaaacactcaataaggatctgctaaattggaccaatagttcggattccgaaaaagctcgtcacgcgacgcaagaaatgtacaaaatgaaaaaaattaatcttgcacaaattaagcaggcttttgatggaactaattgactacctataaagaagtttaggtaaaatacctagtaaaacgaacacttatgagctttcatattttaaagcccttaggtgttcgttttttattaaaagtccttcgttttagaatttctttgaccaaataattgaacagttcaattttctttgtcattttgcattcctctaatcatctaacagcctcacatttgtctgtttctcgacctctcttgtttatctatatatttcttccacttctctctaaaattcaatgtttttcacgtttaacatcaactattcaaattttaaagttactaattccatctcctgctagtcaaaacgagctctttgcttctctttgaccttatatgctatactattatgctgttataaacagctaatggaaaaacaaagggggatgctcaatgaacgcaagagagtacgaacaagagcacgtccaacagacaagcgctttgatccaacaagaaatagtttttttggacagccaaaagaaaaaaacaaaagaaaaatttgatactgatatgttagaaaatgccggacaaagaatccaaggtggttcttttgaagctttggctgaaacaatggccgatactcggcagcatgaagcagaactacttgtacgctaccaatctttagcctctcaggaaaaacggcaacgagctttaagattgatgttggaaaatccttattttgcacgaatcgattttaaagaagatcaagaagctgagacgctttatttaggaatcgcttctttacgggacctccaagaagaaaccgtagtaattgattggcgagcaccgattgctaacctttattatgaggggacattgggacaaactcagtatgaagctcatgatgctatcatcccgattgagttattgttaaagcgccagtttaaaatccgtgaaggtcacatactatcaatggtagatacatcagaagcaatcaatgatgattttctattggaaattttggacgaagcctcttctaatcatatgaagaatatcgtagctacgattcaacgttcgcaaaatgaaataattcgagatacgagaagcaaagttttagtagtagagggaatcgccggaagcggaaagacctccgcattactccagcgtgttgcttacctgctgtaccacaatcgtaagtggttagataatgagcaggtcttattattttctcctaatcatattttttctgattacatctcaacagtcctaccttcacttggtgagagtggtattccgactgaaacatttaaaacctttttaagcgccctacttccgtcctatcaaattcatacagaagaaagccatgaggaagtttttctttctggacaagatgaccgagtattgcgaacgaagagtagttttgcgattgttcaggaattgtacaagtatgtcgatcgtattactgagtttggtccactctttcgtgatcttaagttgaatcaggaagtattaatttctaagaagcaaattcgcaattggtatcaagaagctaatctagagcttccaatgtatcaacggatgcaattattgcaaaccaagcttttgaaaaaaattggtggcttagaaaaagacgaaatgaaaaaagattgggttaaaaaggctgcagatgagttggttgaagctgtatttgttaacaaccctaatatggaagattcagaaaaggctgaacgccgcctacgccgacaaatggcacaaaaaattgtacgtaaaaaaatgcgtccgatccgtagaatgattaatcgatttggatttattaattacgccaaacaatatctgcatttcttacagagcattccaaaccagctcttaactcgctatcaattgactgatgaaaattggaaagatatgctcgaggcacttcgaaccgattttaaacaaaaagatattagtttagaggatggtacgttgatgtttcttttgatgaaatccattcatccattagatgtgaaacaaaaagcccgcttcatctttatcgatgaaatgcaggatttctcacctgcacaagtggcgttattgcgtcacctatatccgaaggcgacgtataccttatgcggcgacttaaatcaaaaagtttttggaaatgaaagtatggttcattcattagaggagatttttccagaacaatcactgactcattttgaattaactacaagttaccgttcaacagaagaaatcaccaacttcgccaatcagtttttaacgcaagaaaatcgcgtggaactaactgctcgtattggtaacctgccgcaagtctattatgctaatgaatctagccaaatgattgaaggcttgattcatcaaattgaagaaacagctgaaatggcgaaatattggcgaacggctattattgccaaaacagtagaagaatgtcaggcattgtataatcaactgactacagctcaaaaagaatacgtgcaactattgactgatgaagaagacttcatgaagaaaagtctgattatcattcctacttatttagcaaaaggattagaatttgatcgtgtttatgcgtggaatatctcgccagaaaattatcatactgaacaagacaaattaattctctatactgtctgcacacgcgcgatgcatgaattgaatttattagttattgggaaaagaagtcctttattggaaatgattccagaaaatttatataaagaacaatctctactataaaaaaaggccagaaagaaaaatgattctttctggccttttttctattaatcatctaattcgacattgtgataaacttgttgaacatcttctaactcgtccaacacatcaatcattttctcaaatttttctaaatcatcaccagttaaagtgacttcattctgaggaatcatttgcatttcagcaacggaaaattctgtaatacctttttctttcaaggcttcttgaatcgcattgaaatcttcaggttcaccatagacaatgatctgaccttcttcatctactacatcgcgtacatcgatttctttgtccattaagtattccaaaatttcgtcagcatcttctccagtaaaaccaaatagtgccgtattgtcgaacatataagaaaccgcaccagaaacacccatgttcccaccgtttttaccaaaagcagcacgaacatctgaagctgtccgatttacattatttgttaatgcatctacgattaccattgaaccgttcgggccgaagccttcgtaacgtaattcttggaacgtttcatcgccagaaccttttgctttttcaatcgctcgatcaataatatgttttggaacattatacgttttcgcacgttcgataacaaaacgcaatttttgattggcatgcggatcaggctcacccgatttagcagctgcataaatctcaattccaaatttagcgtaaattttactgttgtttgcatctttcgcagttttcttagctacgatattcgcccatttacgtcccatgttttcacttctctttcgttaatttcatactttctcattataacgactcccttgcgctttgcaaagtattttttatactcgaatcggaaatcgaccaatcgtttgttccatagggtgaactaattggtaaacttgatccgcacgataagttaagaaatgtttttctttttccttttgacctattttcgcggccactggtaacgtaaattttttcttcatattatttaaataagtctgtcccttttcagtaaagcccaaaatatgcagcattgtattctcctgctccatttgtatctcaacttctttgacttgtagcaaaacataggttaaaagacgttgtaatcgaggctgtgtgtaacgtttcgtactgatttctcttaaataattcgaaaaactaccaagatctcgctcaactaagcgatgctctagaccttccctcatctgataaatatctcgcagtttgtccaatgaacttgcccgtaattgataatttaaatacggccaaaaatctgaccatgagatatgacactgactcacttcagcttgtgtctcctttggcacaaatgctgagatatcttctcccgtcagaacagcttgtcgaatccctgttgcacttgcaaattgatcaataactaactgctcatcatggtagccttgatctttacgcactagcggaaaaatttccattggctgttcgtacattgcattttcctttgcatagcttaatcctaaaatatggttaggaggaaacgccttcgcttttggatacaaacgtgaaacaacttcagccattttttccggataactccagccaatgggaagttcgtgaaaaagctgatcaatcgctgtcttctcttcaataaaaaaacgaccgtattcggcgtaatcaaaaagagaatcactatctgtaccaaaacatagggcatcacacttcaaagcttgcagtagcttaatactgcctctagcgaaataatctgcagattgtaccgcccatgaaaagggcagttccaccacgagatcaaccccattttgcaaggctgtctttgttcgtgcccatttgtctatgatcgccggttctcctcgttgtaaaaaattcccactcattacagccaccaccacatcagcaccacttaattcacgtgccttttcagcatgatatcgatgtccattatggaagggattgtactctactacgattccacagctgcgcatattgatcctccttctctctttgttaacgctaagcagcgaagataaattcacaaaaaaaccgagatttctctcggctatttttgacagacaaaaaaccaacgtttacttgtcttactcggtgcttcatctgtaaagtctgcaaagacttcaaacttaaaaccaacctcagttaacatcttctgatatgtttctaatggatatgtccgttccttatgcaattcatcgattcgttcaaacatttcgtcttctcttttaacaaagaatgtcaaaaaatgttcaacactatgaggaaaatcgcctgaatagctatcccacagaaaggcaaaatcatcagtttgatcatgaaaactatagtcgggaaaaatttcatctatttgatgtgtcgaatggacatcaaaaacaaatgttcctgaaacttctaataaatcatatacaccctcaaaaacttgtttgacttgtgttacgtcccccatatagcaaagggaatctgaaaaacaggtaactgcttggtagtttccaatatctgttaaatccaacatatctccagcaatccaattaatagagacattttcttgaatagcacgattactggccagtgtcagcatttcctcagataggtccaatcctgttatctcaaaaccatttttagcaaattctaccgctaatgccccagtcccacaagctagttccaaaacttggttcgttgtttttggcagatgacgcattgaaaagtccaaccatttctggtataaagaatcgtccattatctcatcatatacaaaggcgaatgtttcataggccattaatctaaccaagcctcgatattttcaagcggtgcatctgaccacaatttttctaaattataaaattcacgttctgaagtactgaagacatgaacaatcacatcacctaagtcgatcaagacccacttcccgccatcttttccttcaacccgtttcacttctacttgtgcttcttcttctttgtcaataatttcatcgacaatcgcattgatttgacgatccgaattcgctgaacaaatcagaaaataatccgccaataatgagacctgtgagacatttaaagccacaatatcaactgctcgtttcgaatcagctgccttcacggcgatttctaacatatttttactatctatgataattctcctccttattccaaatcacttgcttattcaatattgctactattatcattattttacatcattctggatacccaacgattatatgtctcaatcgttttaggataaactggcgtttcactttcgattagatgagccagtgtatgtttcgtttcaaatgctacggcttgatctaaatcactaaaagcaatgacacgcgcatcttctactcctggaaaatgtcttcccggttcgatgtagtctgctacataaataatcttatctaataacgtcatttctgctgctcctgtagtgtgaagacgaatcgcattcaatatctcttcatctgtaatctctaactcacgcgcaacaaagtccgcgcctacaagcccatgccagatagcattgccgtactttaacagctctgttttattctcataatttcctttagcaattgccaatttaaattcttcatcagaacgttctttcgcatagtcatgcgtcagtgctgcaatacttgcctttttaggtgagccaccaaagcgttctgccaaagccactgctgtttcttcaacacctaaaacgtgcttgaaacgacgttcactcattcgcatctgaacagcttgcatcagtgcttcacgatctaatgctgtatacttttcatcatatttcatcaaggtacaatccttcttctgtgatatattcccgcactcgatctggaacaaggtagcgaatcgaacaaccttgattaacctgttttctaatataggaagacgataattggatttcgggtacatcaacccaaatgattggatatgggctttccgatgaatatcctgcgcgcttcacccctacaaagttaacgaggcgaaccagttcatcaattcgatgccatttaggcagataagcaacctcatccccgccaataatgaaataatactccgtatcagggttttcagcagtcatttccagcatcgtatcaatcgtatagcttttacctttacgagcaagctctcttgtatctattgataaaaaagaattatcttcaatcgccaatttggccatcgccaatcgatgcttactatcgatcgttttcttttcgtcgatatgcggcggtaaataacttggcagtagatgtacttcgtcaaatcccattttctgtccgacctgttccgcaatcattaagtgcgcattatgaatcggattaaagttaccacccaatagaccgacctgctttttaggcatcatagtatccgtcattggtttgacttttggaatcgttaagacatcttgatacaacagttactccccctcattattctaaaaagttgtttaaatcccttgcacttctttcgagattttttgatacttttctttgcttgaagctttgtataaaaccaatacacgtccaatgatttgaacaatctcacaattaattttttcttctaatacgtgagccacatcttcagcaatctcatcagtattttgcaataaattgattttgatcaattcccttttctctaacgcttcattgatctgaacaattactgcgtcattgatcccattttttccaatttgaaaaatcggttgtaaatgatgggcctgactgcgtaagaaacgtttttgttttcctcttaattccattcatactccccttatttagatgatagattttaaattaatgctttgcgggtcaagacatctacactcttaggtgcccagccagctacaacggcgggcttcgtcaccgttacccagccaagtcccgcaaaaacaatatccgacttttctttgatagaaaattcgaaacgaactagttctgggaaactctcgacttcatctggacgcggtggttgtagtaatcctccaatatgtttttcatagaaggcatccgctttttccaattttgttcgatgcggatcaatatcatttgacacataagcaacaaatggagcgcgatccccttgaatgaaatcaaaacgagctaaaccgcctaagaataatgtttgaccggcgtttaactgatagactttaggctttatttctttgtgcggagcaataatcttcaagtctttctttccaagataatgcgccatctgatgccgatggatgattcctggcgtatcaaataaatagtggccatcgtctaaaggaatctcgatcttatctaaagtagtacctggaaactgagaggttgtaattaaatcctgaacaccagcagtttgcttaatgatttgattaatcaatgttgatttcccaacatttgtcacacccactacataaacatctcgaccatttcgatactcttcaattttttctaataaatcagccatttcatttgatttacgcgcacttgttaataagatgtcaataggtcgcaagccttcttcatgagcacgttctcgcatccattgtgttaaacgccctctcttcaataatttcggtaataaatcgactttatttccgactaacagcactggattatcaccgacaaaacggtgcagcccaggaatcaatgagccattaaaatcaaaaatgtccaccacatttacaatcaaggcgtctgcttttcctaactcattcaataaacgtaaaaagtcatcatcagtcaatgacacatcttgaatctcattataatgacgcaaacgaaagcagcgctgacagtaaacttcgccactggctaggcctttttccaaagctgaaagcggtgtgtagcctaattcatttgaatgctctgtttgaatctttgcaccacagccgatacaaaataattcttcttccatttatagttcactcttccatttcatatcaggatctttgcgcaacaaaatatgcatcacacgacgttcaaaaaaacgattgattcgcgtattccaaccatctgtgtttaaaatgggacgaaccagaatgctgcgtataccagctgcattagctccgcgaatatcagtcatcacttgatcaccaatcataacaatctcatcttttgaaacacccaattgctgctgagcattctttattcccaccgcaaatggtttcattgcccgagcaacaaagtctagttgaaagctttctaacgctttagccacgcggctagccttattatttgaaacaacaaccacaggaattcctgcgtcatccatcattttcagccaatcaatcagctcttttgtaccgttaggattgttccaagcaatcaaggtattatctaaatccgtcaaaaccgctctgaatccatgcatctttaattgctcaggggttatttgataaatggcttcgaccatccacgttggtttgtatttatctaacatggcaactcctataactttatttatacttctacaaaacctgattataacgcaatttttttgaaaactctacatttcgctacaaaggtttaaaaaaagactaggctttctttgcctagtctcactattcttataatacttttgacaaaaaatcaatcgttcgagggcttttcgtgtggtcaaaaacgtcctctggagttccttcttctacaatcacaccgccatccataaagatgacacgatcgccaacttccttagcaaatcccatttcgtgagtcacgatcatcatggtcattccttctttagccagctgctgcataacttctaatacgtcgccgaccatttcaggatcaagtgctgaggttggttcatcaaagagcataacatctggttgcattgctaatgcgcgtgcgatagcaatacgctgctgttgtccaccagataacgattgcgggtacgccccagctttttccgacaagcccactttttcaagcaattccttcgcgatcgtttccgcttcagcttttgccaatcctttaaccttaatcggtgataaagtgatattgtctaaaaccgtcatattgggaaataaattgaactgttgaaaaaccatccccattttttcacgtgttttaaaaatgtcattctttttatcggtaatatctgttccttcgaatctaatagtgcctgaagtcggaacctccaataaattgacacatcgtaaaaacgtgctttttccagaaccagagggcccgataatcacgaccacttcgcctgggagaatctccgcagatatatccttcaggacttcattgtcaccaaattttttatttagatgttcaatttgaatcaatgcttctgtcattatattcacctctgctccttatcgctgatagccttttccaagttttttctcccacagatttactaaacgggaagtgatgaaggtcatcacgaaataaacggccgcagcgacaattaatggttctaaaggaatataagagtttgagacaacgatttgggcagagcccattaattcattgatcccaatcgttgcaagcaaagatgaatccttaatcaaagtaataaattcatttcctaatggcggtaggatgtttctcaacgcttgtggtaagatcacataacgcattgtttgcgctggacgcaatcctaatgaatgcgcagcttccgtctgaccataattcaccgctgtaataccgccacgaatgatttctgcaacataggctccagaattcaaagataggacaatcatccctggaaataagcgactcaggctaactgttaacaccccgacatctaaatctttggaaggaaaaaaaccttgtaaaattaaaaatccgattgtaatttgtaataacatcggagtgccgcgaagcacttcgatgtagatatttgctaaccagtttaagggcttgtgtttagataactttaatagtgccattgcaagaccgattaaagtcccaagacaaactgttactagcgagataataacggtaattcccgctcctgaaacgaaataagataagtatttatccaaaaaagaaaagttcaaaacctgtttcccctattcttctgctgatttttcggctaattcatgattttgttgaacatattcatcaatcttgccttcatcattcaactttttgataatcttattaatttctgcttgtagtttatcactgccatcttttggtaaagcaattgcgaaggcttcatcttcatttgcctttaaatcaatattagcgatcattaattcaggattttgttggacataagattctgcgattgttttttctacaaccattgcatctaacgaaccgctgttcacttcaatcaccatgtttggtactttttcgattgaaacaagtttggcatctttaatttgtgtttttacaacatcctcttgaatcgaacctttttgcgcaccgacatttttatcttttaacgtttctaaacttgtaaatttattttcattctttttattgataatcactacttgtggcggattgtagtagttatccgtaaagttaaattgttcctgacgttcttttgtagcagaaatcgctgagatagcgatatccgattttccttccttcaatgaagctaaaacggtgttaaagctcatgtctgaaacttccgccttgactcctaattgcttggcaatctcattgactaaatcgatatctgcaccgacaattttatctttaccgtccaccatggtatggaactcaaacggcgcatagtccgctgaagttgcaacctttaatacgcctgcttttttgattgctgccaattgatcctctgttttagcacttgatgagtccgatgatttatcgccgcctccaccacatgctgctagggtaaataatgctactaatgtcataactaagccggtaatctttttcatcctaattcctcctatttttgaatgcttttttcaatgaatttattatagcatgtaattttcataaaacaagcatttttatgtataaatattaaaatatttttggaaataagttctattgttgcatatatcccacccctaaatgtataaatatttttatcatgattgatagaaaacttctgactactctcaattttcattatataaaaacaaagacgacggcctttgccgtcgtcggatgtttggttaaaatttacgaaatcgttgatatctattttcgatcaattctttagtagaaatttttgataactcagtaattttttcaatcaataattttttcatcatgcgaataatcttatcttcactgagtttttttcccttcaacgtttcaggaatgactcgatcaataacatctagctctaaaagctcagctgcggtaattttcatcagctctgccgcctcatccgcgcgctttccatctttccaaagaatcgatgcaaagccttcgggtgaaagaatcgcataaatgctgtattccatcatccagacttcatcagctaaagccaaggctaaagcacccccactaccgccttctccagttacaatcgaaataattggtacttttaaatcagacatttccataaggttacgagcaatggcttccccctcgccacgctcttcggcttcaacaccgcagaaagctccaggcgtattcacgaagcaaatcacaggtcgcttgaatttttctgcctgcttcattaaacgtaacgctttgcgataaccttcaggattgggctgaccgaaattacgcgccatattttcttttagatcgtttcctttttgaatcccgatcacagtgactggctttcctgcaagattcgcaattccgccaacaatcgcaggatcatcaccgaataaacgatcaccatggaattcttgaaaatcggtaaaaattttttcgaaataatccagactagtcagacgttcttgatgtctcgctaattttacaatttctccagcagtcagacccattattcgcaccagcctttctgttgatggaatgataataattgcgttaaacgatcgcgcagctctaaacgcggaacgatctgatcaataaacccatgctgcaaaagaaattccgctttttggaaatcatccggcagttgttgacgaatcgtctgttcgatcactcgtcgaccagcaaatccaactaaagtttgtggttcagctaagataatatcgccttccatcgcgaaactagcggtcacgccaccagttgtcggatcagttaagacagtaatataaagtaagccggcattactatggcgcttaaccgccgccgaaattttagccatttgcattaaagaaaaaattccttcttgcattcgagcaccaccagaagccgtaaaaagcacgactggtaattcttcaacgatcgctttttcaaagagtcgcgtgattttttcaccaaccacagttcccatactgcccataataaagttagcatccattacaccgattgcaacattttgatcattaatcgttgccttgcctgttataatagcttcatccaacccagttgcttcttttgttttatcgattttagccaaatacccaggaaaatcaatcggatttttttgaactaaatcattgtcccaatcgataaaacttttttcatcaatcgtcaatgccaatcgttcccaagcgctgattcgaaagctgtatccacagtgaggacaaactttttcggcacccatctcttttttatagagtgttcgtttacaatttggacatttcgcccacatatcgtcagggacagttggcttcgttgtcggtacactgtcgcgattaggattgatccgaatgtagttttttttcttattaaaaaggcccacctaaattcctcctactcgctttgttgccattcaggtaaaaatgttttttgtaagaagcttgtatcataatctccaaataaaacacttgggtggctgatcagatccatttggaattcaacgttcgtaatcacaccatctgaaacaaattcacctaaggctctttgcatcttcattagagcatcaaaacgatcttctccgtgaacaataatcttcgcaatcattgaatcataatatggtgggattgtcactccgctgtacatcgcactgtctacgcgtaagcctaaaccaccgcttggtaatagcaacgttttgattttccctggagaaggcgcaaaattgaacgctggattttcagcattgatccgacactcgatagaatggccctgaaattttacgtctgattgttttaaacctaaaggctcgccagcagcaatcttgatttgctttttgacaatatcgattcccgtgatcatttctgtgatgggatgctccacttggatacgcgtattcatctccataaagtagaaattgccctcttcatcacgtaaaaactcaattgttccagcgctttcgtaatttacagcctttcctgccttaacagcaatatctccaagcatcttacgattctcttcgccaatcactacagaaggcgcttcttctaaaaccttttgattgttccgttgtaatgaacaatctcgttcgcctagatgaatgacctcaccctgctgatccccaagaatctgcacctcaatatggcgcgctgggtaaataattttttccatgtacatcgcatcatcgccaaaagctgctttagcttctgatttcgcagatagaaaatgtttttcaagttcacttttcttaggaactttacgaatgcctttcccgcctccgccagcagcagctttcagcatgactggataaccgattttatctgctagtttttcagcttcctctaaagtatcgatcgctccatcactgccgggaatgactggaacaccggcttcttgcatcaattgtcgcgcgtggattttatttcccatcgcgtcgatggttttttcacttggtccgataaatttgatattgcattcggcacacatcgttgcaaacaaactattttctgacaagaaaccaaaacctggatggattgcttctgcattggtcacaattgctgcgcttaaaatttcctgcatgtttaaataggattcgcttgaacgagccggaccgatgcaaatcgcttcgtccgccatctcagtgtgtaatgcttctttatccgcctcagaataaaccgcgactgtctgaattcctaattcacgacaggcacggatgattcgtacggcaatttcgccacggttggcgatcaaaatttttgaaaacatagacatctatccaatcataaaagtcaattctgcttcggctacttttttgccatcgacatacgcgatgccttttccgcaaccagctgaagaacgaacctttgttaattctacttctaatactaaagtatctcccggcacgactttcttacggaatttcgctttatcgattccgccaaaataagctgttttgcctttgaactcctccattgataataaagcgacagcacctgcttgggccattgcttcaacgattaatacaccaggcattactggttcatgagggaaatgtccttggaagaatggttcattaacagaaacatttttctttgctttgatacttttacctgcttctaattcttctacgcgatcgatcaacaacattggatagcgatgcgggataatttctttaatttcttcaattgttagcattttaaatcctcctcgttcatattaacggattgtttttttatcagtctgattttctctacgtagcctaattcactaaagttagaaacccgaagaatttggaaaataaaatcaattcaaaaaacaaccttttaattgtcgttggcatccgagtccactaaccattaaaaacacccaagtgtaactcataacgaacagcctatttaaccaattcggaatagtggttggccgtattcaacaacgtcttcattttctactaagatctcagtaacagtgccatcaaaatcacttgtgatttcatttagcaatttcattgcttcaatgatgcaaacagtttctccctgtttcactgaatcaccaactgatttataggcctcttgatctggagatggctgtaagtagacaatccctacgattggtgaagtgataacttgaccttctccttttgccacagttggtgctgcttccggttcaaccgttgtcgaactagtcgaagttgctacagcgactggcgcttccacggattgttccgtttgactaggtgccgcagtttgacgacttgtttgatttttattcatatataattcaaaactgccctctcgtaaatcaaattcagtgagattcgaatcgttgaattgattcagcagttccttgacttcattgatttccattgttatgcctcccagcgtttcaaacagatcacagcgttgtgaccgccaaaacctagagaattacttacagcgtagttgactgttgtttcttttgcttcattaattacaacatttgctacaacctctggatcgatctctttaatatttgcagttggtggaataaattgatgttgtaaagccattagggatgctaccgcttcgactccgccagcaccgcccaataagtggccagtcaacgattttgtactgctgacataagcattgtcagtcaatgcttttgcaatcgctcgactctcaggaacatcattaggtggcgtacttgtaccgtgagcattcacataattcacttcttctggctgaatcccagcctctttaattgcttcagtaatcgctcttgcagcaccatcaccatcaggtgtaggcgatgtcatatggtatgcatcacaggttgcaccataaccaacaacttcacctagaatttttgcaccgcgtttttgcgcatggtctaaagattccaagaccaagacaccggcaccttctcccatcacaaatccgttacgatctttatcaaacggaatggatgcacgagcaggatcttccgaagtgctcaaagctgttaaggccgcaaaaccagctattccaattttgttaatacatgattcagcaccaccagcgacaattacatcagaatagccatgctttatatttctaaacgcttcaccgattgaatgtgtaccactagcacaagctgttacagtactagtacaaattccttttgcaccaattcgtaatgccacatttcctgcagccatattagcaatagccaaaggaacaaacattggtgatactcgagcggggccctttgcatccatttttagtacctgatcttggattgttcccaaaccgccaacaccagagccaatcatcacgccaaaacgttccatgttttcctcttctgtgttaataccgctcatttctaacgcttcaagagcagaatagatggcatataatgaataagtttccatccgtttcgtatcttttttaacaaaatatttttccaaagggaaatccttgacttctgctgctaccgagataccagtttcgctggcatcaaaacgcgtgatcggtccaaaaccatgatttccttcttttaaattctttaaaaatgtctcttcatcgttaccaattggtgatgcgacaccaaagcctgtaattacaacacgattcatttacttccgtcctttctttacatgaccattccgccatccacatttagcacttggccagtgatgtagctgttttgagctaagaataacgcagcattcgctacatcctctacactgccgaaacatttcaacgggatttgaccttccatttgttcttttactttatcgtttaattcatctgtcatatctgttttgataaaacctggagcgatcgcgttgcaggtgatgcctcgcggagcaacttctctagctaccgctttagtaaatccaatcacaccagctttactcgctgcataattgctttgtccaacatttccgatcagaccaaccacactagaaaggttgatgatcacaccagcgcgttttttcatcatttttttcaaaacttgctgggtcatgttgaaggttcccttcaaattgatatccataaccgcatcgaaatcttccggtttcatgcgtaaaagcaactgatccttcgtgataccagcattgttgatcaaaatatcgatcgagtccaacgactcttcacattccttaatcattctgcccgcttcatcgaatgagctgatgtctccgcaaatactaatgcattttacgccgaacgcttcgatttcagcaatcttgtctgctggaatttcctttcgaccgttcaaaacgacatttgcacctgcttgagcaaaagtctttgcgatgccccagccgattccacgactactgccggtaataaacactgttttattcgttagttccattcgatcctcctaattcattttaaggaatttattctcactactcatactattcacctaaaaaactgaccgtctcagctaatgtctttacatcttctacacgactggttgctaacgtgcgatcaattttcttgataaagcccgtcaagacttttccaggaccaatctcaatcaattgagacacaccaagttctttcagagttacaatactatcactgaaacgaactggcgacatgacttgttttgtcaaaagctccacgacttgatcctgtggcataatttccgctgtcgtatttgaaatcacaggcacttgcatttcattaaaagtgattgtctgcaatacttcgtttagacgcttgctggctggttccaatagcgctgtatggaatggtccactgacattcaatgaaatcatccgttttgttccagcagcttgcaataattcttccgctttttcaactgcggccacttcaccgccaatcacgatttgttgcggagtattatagtttgctggcgaaacaatacctaaagccgaagcttgcttacagcagtcttcaatgatctctgctggcgtattcatcacagccaccattttcccactgccagtcggtgctgcttcactcataaattgccctcgtttgtgaaccaactgaacggcgtcactgaatgctaatgcaccagaagcaactaatgctgtatactctcctaaactcaatcctgcaactgcatcagcctgatagcctttagtccttaacacacgtaaaaaagcggtgctgactgttaatattgctggttgcgtatatttcgtttcgttaagctggttatttccttcgaagcataaattctccatcgaaaaacctagcagatcgctggcttcttcaaacgtttccttcacaattgtttcttgctggtacaactctttacccatcccgacatattgagcgccctgcccgctgaacaagaatgctgttttcatgatcgtctcctaatagcaggaaaggccaggccttacgcctagccttttcccgaaattttattaattaagcgttttgttgtttttcaacatattcaactaaatctttaactgttgtgatgccatcttctgtttcgattttcacatcaaattcgtcttcgatttcgttgatgatttggaataaatctaagctatctgcttcaagatcttcttggatatttgtttctaatttaacttcctctttttctacccctagttcttctacgataatgtcttggattttttcgaatgtcataagttgtttcctccgataattttaagttttagtttttatatttttaacaaacttacagctggataagtaggtttccccacgctaatccaccgccatagcctgtcaataccactttttgattgctatttaatgataaaatatttgcttcaatgagttcatccaataaaatggggatgctcgccgctgaagtgttcccataattcatcagattcatggggaatttttcaattggctcattcattttacgagcaattttttcaatgattcgtttattggcttgatgcagcagataataatcaactgtttcttcaccaataaattccttcaaacttttagtgacatcattcaaggcgaaattccagatgccgcgaccgtccattgctaaggtcgcactcgtttctggtccttcatggaaaatattactgtttttgcggaaaccagatgtcaacgaattggcgcgctcaccatctgctcgcaacatttgctttataatagaagctttttcatttgcttctagcaaaacacccgctgcaccatcgccgaaaagaactgcagaagaacgatcctgccaatccaacaacttcgaagttttctcaccgccaatcacaatgcctcgctgcattcccgcacgcataaaattttcagctgtggccagtgcatagacaaaccccgcacaagcggctgcaatatcgaaggccattgcttgtttagctccaagttctccttgtacctgacaagcgacagaaggagaagtgtaatctggtgacatcgttgcaacgataatgaagtctaaatctactggatcaatcccagatttatcaatcaatttttttgcaaccagcgcgcacatatctgaagtattttcagtttctgcaatgtgacgctgtttaattccagtacgtgattgaatccattcatcagaagtatccatccattcagccaagtcatcattactcacgattttctcaggtaaataacgggctgttgcggttatttttccgaaactcatactcatttgatctcctctaagtaactatatagattcactagcgcctttaagaaaacctcttgttcatcctcatctaaatccttgatggcacttttgaccatttcatgatgaaaatgttgatgaatacgaaaaacgagtcttccttttttcgttagacctaatttgacaacgcggcgatcatcctcactgcgaattcgttctacatagccctttttcactaagcgattgatcgatgtcgttaaagtcccaacagttactaatagctctctagcaacctccgtggtcgttttcttcttgtacatcccgatcgcatcaatggtatgcatctccgtgatcgtcaaatcgctgaattgtgatttttttagttcgttttcttcaatcgacaaaacgtcgttgaaaattgaaactaaataggtatttaattcttcccagtttctttccatgtcctcacctaattagtttgattatcaaatcatttgatgttcaaactatatcttattttttttctgaatgcaacaagattttttcaattaaccaaaaattaatgattaacactcaatatagataaatctagtcattaaaaaatactttgggtgtcaaagtaattaaaaaaagaaccgcatattagcgattcttaaatatagcgattatttaatgtaatcatggttgcgagtaaaacagtcaacatacataaagacaaaatcatattaatttttttattcgacaaactcaagattttttctttactggaaaatagcggaacaatgagtaaacttcctgggataaaatatcttccttggactccttcaatagagcttttgcgattaaccttattccatatctgatacaaagcaaaaaaagtaagaaatatatatgcgacaattcccagtatcatcaatacacgttggaggatcaataaagaatgatctccctcttgttggactaggcagccgatggtcagactgataaaataaataatcacccaatgccatcccagtggcgtatctaaccatccaaaatttccgacaaaagaatagatgatgccatccccttttattccaaatagataattctcgaaaaaatttacgaaaaatatctggggattattgagaaacgcttttacctgagcttcaggatttgcaaaatcacgataaagaagctgttgatcaatcattaatttattccaggaaacataaagtaaaatactaataagaaaaattcctataccccaaataccctttctttttagatccaaagttttgttagggattaaaaagaacaatattcctaatacgattaacgttggtttcatcaagacaaggctcaccatcatcagagcgctgactaacatttgtcgatctgttatttttgcctcgctaattaatttcaacatccaagaagtaaagaaaaaacttccagcaattatcataccgtcgcctgaaacagaagaggtcagaaataaggccattggattcagcgcaagtattgctgctccccacttagaaaaagggaaaattttaagggcgaaaaaaacaataaaaatataaaaaattaaattgaacactctcgctgaatagtattgccagacatagtttttttgaaataattttccaatctgaatgcctattaattgaggtatataattaataaacgaatagttggtaataccaccagtaccaataaacattttttctgcaatatttttttcttttatctggtagggaggtttagactcttttccttgtgtctgattggcatactcattcattttgtaaatttcagaagagaccttaaatccatattctccccaggttgaatttccttttttactagaagttgaagacttttctcgtggacgaattttaaaatccgaaaaagcttctgcttttacatagtgcccaatctcatctggcgcttgcagtggaggaattgtctttatcatcaacacaccaaaaaaacttgaaaaaactaaaaagaattttagaacgtaggggagttcaatgagccttttgattttttccttcatgctattttttatttgttctaccataattcctccttaaaaaaagaaacacgtaatttttataaaataattatatcagtaattgagaatactgaatatgtatagtcacaatctatattacacttgttttaattcaaaaaagaagcgggagttccgcttcttaaacattccgatgcataggtattgaattattatttggatgaaccagtaaatattgaatgacatcgatattgctggcctgaaatgatgctgcacaagcttgtaaatataaatcccacattcgatagaaagcttcgtctttttgctccataactttgtcagcaacttgatggaaatttcttgtccaatgttctaaggttaattgataatcacgtcgcaagctttcaagatcaattaattgtaaatcgttttctgtgatatgtccgactaattccgtcacaccaggaatatacccgcctggaaaaatatattgattaatccacgcatttttcgcaccaccttgctgacgactgataccatggatcaaagccgtaccatttggcgctaaatgtcgtttaatcactttgaaatattcttgcaaattttcggcaccaacgtgttcaaacataccgacacttgtaatatgatcgaaagttccaactaaatcacggtaatccataagttctactgaaacagtatcttctagttgttctttggtgattatttcttggatatgctgatattgctcctcgcttaacgtaatacctttagccttgaccttatattctttcgcggctgtcaaaatcaacgtaccccaaccacaaccgatgtctaacaatgtttcacctggttgagtaaatagtttatctaagatgtgatgaactttatttatttgtgcttgttccaaagtatcgtttggcgactcaaaaaatgcacaagaataggtcaaagtatgatctagccacatctcataaaaatcatttcctaaatcatagtgactatgaatatcatgagcggattgcttttttgtgtgcttttcctttggcatccatttcttaaaattcgtattatgaaaaaaaccatccgcttgattataaacatcataaatcaatgcctgcaggtcgccctcgatctcgattttcttttccatataagcttcgcctaatgctaatgaagcattatttatgagttctttaacagggatcttttcgttgaaaataattttgaagattacttcactttcagaatcaccatactctttcacagaaccatcccagaaagtaacttgcgttctctttgaaaaagatggcttaaatagttgattgtatacttctttgtctaacatatcattacctcctcataatatcttctgactaaatcttaataagttcaaaagatttgacctgagttggcttaaaaaataggaattactcataaaattataatcaaaaattatctgaaaaccctttagtccaaagaaaaaggtgaccatctaaaaataggaagtaatgaagctactagtctgagtagcactcttactaactattagttaaacaagtaaaaatgtgtacaaaaaaaacgggtttccccgttttattgaatcaaatcataaatttccatcgcaacaatatcgatgttatcaaattgataagattgtttgctgtcgctttcagtcagctcaaatgtttctgtcgtattatcataagttacagtacatttttctacgccctctttttcaaaacgacgtacttgtacttcattatcagtcgattcagtcattgcttctaagcgtttaataatggcaactaattgtgaatgtttcatctaggtgccccccttcttctcaattctgtcttattgtatcaaatccgaccgtatcttgcattgattttcatcaataaatttatgttttttttactaaatctaacttaagatttcgaccaccataatttaattaatgcttgtgtcccgtcattgtcgaatccttggtcagctaaccgttcatataattcagtcgctaattttgttgcaggaaggtttaagtgcatcttctctgcttcatctaaagcaatttttaagtctttgataaaatgtttgacgaaaaagccaggggagtaatcagcttttagaatccgtggtgcataattgctcatggaccaattttgtgctgcgccgccacctaatgtctccaaaactttctctacatctaagttcgccgccttagcgtagaccagcatttctgtcatccccgtcatcgttccagcaatcatgatctgatttgccatttttgtgtgctgaccagcaccagcttttccttgaagagaatagcttttgcccataatatcgaaaagaggtacaacactatcgtatactgcttgatctccgcctatcattatcgataatgttccattctgagcccctaaatctcccccggataccggagcgtctaaagctgctgcgccctcttttttagctgtttgataaatcttttcagccagtgttggagttgaagttgttaaatcaaccaaaatcttatctttaacctctactgagaagattccgtttgcgccataataaatttcttctacatcgctaggataacctaccattgaaaaaataatttcgctagcattcgtaacttctgctggtgtctcttgccaaatcgcaccttgggcaactaattcatctgatttgctttttgtacgattgtacaccatcacttcatgaccctttgctaaaaaatgtttaacgattgattttcccattacaccagtaccgataaatcctattctcatgctattaaccctccataataaaaaataatccacctccagtatacatgaagaggtggatttcagctttatttatcttcgttgtttctaagggaattaattcgaacccgcattttttgaactgttcgactaggcaatcttacttccgtatagttttcagcataataagcaatcatctcttgatagaacttgatcatctcatcaccgaagcgctcagccgaaatttccattagttttttttgttggaccctaggatctatagcgatctgttgttgaacataactaacaaaactttcactaaaatccgcatcctgttcaaatgtgattcccaaagactcatcgtttaacaattgatttaagtaatcatttccttcaacaatgcattgtgtccccgacgcaattgcttcggcgtaagtcaagccttgtgtctctgaagtagaggcgctaacaaaataatctgcagcatgataataatatgcgacatcctcatgaggaacttctccagtaaattgtatatagtcttcgacacctaattgacgacttaactcttctaaatcttcacgataaggccccttgccaacaattactagtcgagcgttaggataactcattaaaacctccggaaattgttgaacaatgacatggatattcttttcataagaaatccggctcaatgataaaatcatcaaatcatctgtgtgtaatcctaacttatcccgtagctgatctgtatctttcttcgttatatcaggtcgtgaaaatctagatacatcaatgcctgtaggaataattcgcattggaacatcaacttcataacgctttagtgtgtccaccacacgtttactagggcacacgacgccagttgaatgattaacaaacatttttatgaaatgtttaacgtgagatggtcttacgactttcccattcgcaatatagtgaagatagtcttcatacatcgtatgataggtatgaatgactgggatacgcaaacgatttgctaccattttccctaaaaatccggtcccaaactctgtatgtgtatgaatgatctctaattctaattccttggcaatttgataagcaaaccaaagaccacggactacaatccgccgatctgtaaaggatataaaaggaacgctaggcatacgtacaatatccttttcaaattcatctgcatcgggatctgtcgtcgtaaaaatataaacctcatggccttgcttttccagttcattttttagtgttctaattgatgttgctaccccgctgacctggggaaaataagtgtctgtaaaaaaaccgatccgcacgtccactcctccaaactattttgtaacttttgcatagacctgatgatcatacggcagctccaaaaccgcttgataaacagatttcaactcttcaccaatttgcgtaatacttttttcctgagctgttctaaaaccagccatagaaagattaggtaaacgatgattgactaattgatgaatcaattgttcaaattcttgattgttatcccccatatagcaattctttcgatcctccatccaaccatcgtagacaggaatatttcttaataagacctgctgctgactagctaaggcttctagtacaacaatcccttcagtttcttcataagaaggaaagaagaataaatcagctcccgaataggccccttcaatcaaatctccattgatatagccagggaaaataacattttttgggtgtgctttttttacaacgtgtctaatattcgccgggatcgaaatcattggtacatcaccaaaccaaataaatgtatattcaggcattttctctgcaatcttaacaaaatctagaattcccttgcgttcaaaaaagagtcccacacaaatgatgaccttttgcgtttccgtcaaattaaaatgtttcctaaaggctgcttctttatgttcgtcaggatagtatttttttaaatcaatcccatttgaaatagccgagatcggctgagttaagccataactgcgcaacaatttttttgaatagggtgtcggcgtaattaaatgatctgcttgttggtataaagagacaagccattttttgaacaagggcgcaagctgattcgatccaacaaatgaatttcgaaaatcctcttcagttgaatgtgcatgaaaaacaatttttttaccgagtcttttggctttttttactaaacgtaagcttttcggtccatacgtattaatatgtaaaatatcataatcagtcgctttagggtccaatgtataatcaatgccaatggagcttagcgctcttttttggtggctaagcgctcgaccaatgccagatttaccaattacattctgaccttcaaagtataataatattttcataagcgcctccttctacatttcactatgatgactctttgcataattatctttattttctcgattcacttcttaaagcagtaagcaaatcgaaaattgacttccttctaaaacaaatcaattatatcataagcatttcagctttttctcaacctatagtctgattttacaatgaaaacgtttgcttcgtttttttaagaagatatgtaaaaaaccgttgcctttaaaaggcaacggttcaataaaccatttttattttacatattcttctactaattcttgaacttcttccattgtgtcgcattctttcaatgctttttcagctaattcagccatcttagttgttgttagacgtttcatcaagctacgagttctaagcacagatgtagcactcatagagaactcatctaagcccatacccattaacaatggaacagcagtttgatcgccggccatctcgccgcacataccagcccattttccttcagcgtgcgctgcatcaatcacgtttttgattaagcgtagaattgatgggttatatggttggtaaaggtaagaaacgcgttcgttcatacggtcagctgccatcgtgtattgaattaagtcatttgttccgatactgaagaaatcaacttctttggcaaacttgtcagctagtacagctgcagctggaatttcgatcatgattccgacttggatcgtatcagaaacttccacgccttctttaaccaatttttctttttcttcgttgaacattttcttcgctgcacggaattcttttaatgtcgcaaccattgggaacatgatgcgtaagttaccatgaacagaagcgcgcaacaatgcacgtaattgtgtacggaacatgtcatcgcctagttcggatagactaatacgcaatgcacgataacccaagaatggattcatttcgtgaggtaaagtcaagtaaggtaattctttgtctcccccgatatccattgtacgaactacgactggtttgtcgcccatgccttctaaaacggctttgtaagcttcaaattgatcgtcttctgttggaaaatctgaagagtccatgtataagaattcagtacgatacaaaccaattgcttcagcgccattattatgaacgccttcaagatcttttggtgtaccgatgtttgctgctaattcaaaatgcttgccatcagctgtaactgtttcagcatcctttaatttttcccattctgctttttgcgttgcgtaagcttcgccagcttttttgtattcagccgcttgttcttcagttgggttaacgatcgtttcaccgatgattccattaactgccaatacatcgccttcttttactttagaagtgatttctttcgtaccaacgattgctgggatttctaatgaacgagccataattgctgagtgagacgtccgtccgccaatatcagtaacaaaggctttaacaaaatttttatctagttgagcagtatcacttggcgtcaagtcatgcgctacaacgataacttcttcgtcgatcattgatggatctggcaaagatactcctaataaatgcgccataacacgtttcgttacatcgcgaatatccgctgcacgttcttgcatataagcgttatcatccattgcctcgaacatgccaatatacatatcagttacttctttaagtgagctttcagcattcactttgttatcttgaatatgttgcttaatttgaccaatcatttctggatctgaaagaaccattaaatgagcatcaaaaacttgtgcttcttcttcacctaagcttttcgctgctttatcccgaattttttctaattcagcagaagaagccgccaaagcgtcgtctaaacgcttttcttcggcagcagtgtcttctacattattttgtttgaaagataaatccggttgtactagcagataagctttcgcaacggcaactccgtcacttgcggcaataccttttagtaattcaaccattattcagataatccttctttcttcattgtttctacgattgcttccattgcttctttttcgtcagcaccttcagcagagatagtcacgtcagagccttggccaacacctagagacataactcccatgattgatttaaggttaactgattttcctttatactctaagttaatatcagagttaaatttgcttgcagcttgcaccaataaagttgcgggacgtgcatgaatccctgtttctgctactacgtgaaaatcttttttttccatattgaccgttctcctttataaaaaaaaatgtttttttatgttagggctttaatgataacatccatctttttgagcccttcattttcttagattaccatttttttgcggtggatacaacaattttaatcgatttattctctcaatttgtatgccctttcttaaaatatcttgattaactgtttaaacccttattattcttgttttcatcttttttacataacaactatgacttgcgaaaaaagtaattgtccattcattttagcactctatatctctgtctgctaaaaaatgaaacaaactgtttgcatttattgagattctcgctataattattcttaaggtcagtaaaagtcaaacaactgatcagcgtatctttttacgagattcgcttactcgatgtacaatggaagaaacaattaactgttgaaagggtgaaaaaaatgctttgccaaaattgtcatgaaaatgaagcaacgattcatttatatgcaaatgtcaatggtcaacgaaagcaattagattattgtcaaaattgctatcaaaaattgaagaatcaagctggaggtgcgccgcaaatggcaggaaatgatccttttggttttggaagtttagatgacttgttccgctctatgtcccaacaaatgcaacagcgtcaaggagctgcggatcaaacaccacctacccaattcggtggcggaaatggtattaacaatcaaccaccccggaataatggtggcggtctattaggtgaatacggaattaatatcacaggattggctcgtgaaggaaatatcgatccagtcgttggtcgagacgatgaaattcaacgcgtcatcgaaattttaaatcgccggacaaaaaacaatccggttcttatcggagaacccggtgttggtaaaacagcggttgttgaaggattggctcaaaaaatcgttgacggcgatgtaccacagaaattaatggacaaggatgttatccgtttggatgttgcttcgcttgttcaaggtactggaatccgtggccaatttgaagaacggatgcagaaattgatcgaagaaatacgtcaagctgaaaatattatcctcttcatcgatgaagtacatgaaattgttggtgcgggtgccgccggagatggcaacatggatgctggtaatatcttaaaacctgctttagctcgtggcgaattgcagatggttggcgccaccacgttaaacgaataccgaatcattgaaaaagatgcggcgctagaacgtcggatgcaacctgttcgagtggaagaaccatctgttcaagaaacgatcgaaattttgaagggtttacaaccacgctatgaagattatcatcatgtaaaatatacggatgatgctatcaaagcagcagctgagctttcaaatcgttacattcaagaccgcttcttaccggataaagccattgatttgctagatgaaacaggttcaaagaaaaacttaacgattcaaatcgtcgatccaaagacgattgacaagaaattagcggaagctgaacaacaaaaatcacaagcttctcaagaagaagattttgaaaaagccgcttactaccgtgatcaaatcaataaattgcaaaaaatgaaagatcgtcaattgacggatgaagaaacaccggtcatctctgaaaaggacatggagcagatcgttgaaaaacggactggcattccagtgggcgaacttaaagaaaaagaacaaacacaattgaagaatcttgccgtcgacttgaagcaacacgttattggacaagatgaagcagtcgataaagtagctaaagctattcgtcgtaatcgtgtcggtttgaataagaaaaatcgtccaattggttctttcctgtttgttggacctactggtgttggtaaaactgagctggctcgtcaactagctgaagaactatttggctctagtgattccatgattcgctttgatatgagtgaatatatggaaaaacacagtgtctctaaattgatcggttctcctccaggttatgttggatacgaagaagctggacaattgaccgagcaagttcgtcgtcatccctacagtttaatcttactagatgaaatagaaaaggcgcatcctgatgtacttcatatgttcttgcaaattcttgatgatggacgtttaactgattctcaaggtcgaacagtcagctttaaggacacgattattatcatgactagtaacgctggaactggcaagatcgaagccaatgtcggtttcggagctgcaagagaaggaactacccgctctgttttgggtcaactaaaagacttctttgctcctgagttcttaaaccgttttgacggtatcatcgagttcagctcactgtcaaaagaaaacttgatgaaaatcgtttcgcttatgctagatgatgtcaacgaaatgttggcttcgcaaaaacttcatattgatgtaccagataatgtcaaagaaaaattagtagatcttggctatgatcctgcaatgggggctcgtccattacgtcggacgattcaagaaaatatcgaggacggaatcgctgaattctatttagatcatccaacgattaccgatctaaaagcaaagcttgataaagaagatcgtattgtgatcacgtcaaagcctgaacgcttagccaaagaagataaagtttaaaaggaaaggattctctatcgcgagaatcctttcctttttaccaaatttttcaaatattctaataaaagtgagcaacatccttcttttttcttaatctttcttatataattacattatggagtaaggtttaggaagaaggtgtttcaggatgaaacttattaacgtgaccaatagtcattcgcaattggtttataatcaactggaaaacactgatgcaaacatgattaaagtctatacaatcggcaatacgactgtgatttatacagatgcctataagcatgccgaaattgtattaaaaaacgataatcgaaacatcctgccatcagaagttgattttgtacataaatattttaaaagaaaactagacaagggaacttatgatttcgcaaatatctcttacttggagtcccctggtttaattgaaatgtcgatcaataaaaaatagttggagctaaaaaaacttagcttcaactattttttgttgattctcttagcaataatcggtaattgtagaattcctacaaaggccaaaatttcaatccattgaatcactggcacacctgcccctgtataaatcatcataaacatatccttacgttctggtgcccaagagcaaaaccatgaaacaccaataataaaaattaaatatgacaatgttaatcctagtaagagcaataacaatccgcgaaaaatttttaactgtgcctttgaaaaaaggctgcccactaagattattaaaaccccaaatccaaataaaactaaccaaattggatttaaatcacgataaatttgaatgatacgattagataacttggcagaatttgtaattttaaccggctcagaacgaggcttattcacatcttgccagttttcagcaaaagattgatttagtaatttttctgctttagctacatcctcttttggcccaagggttgtgtctgatccctgaccatagtttttgtaaaaaagattatacttcaaaccgctttgcatgaaatcccctactgatggcaggtctttcattaatttgccgtctcccgtagcagtaagataaatctcttttttctctttaatttgtccatttttgtatgctttggctaattctgtgtcaactttttcccaaaatcgttctgttttttttccatccttataatacccagcctgatctgcagcatctcttaatgcccaaaagatgatatcgccagcgatatcttcgccaccgctccaaggacttccttgataaatccagtcaatatttttttcgattgatttaagtgtcggtgaagccgcttcagcctttttcaatgctttttttgatacccagaccttgctgttcgtttgattcaaatttgtcccatcatccatgcgaattaactgctttgagacattggcaaaagctccacctgtccggtcattaaccacggcgattccataatgctcttcgtttattttttcaagtaactttgttgtagaaaaaagcaaaacgaagggtaacacacaaaaaattaacttagccaattgccttttcgtaaagtagaattttttgatagctatacggatatttttgattttgaagctagaatcattttcaaaaatgacagagccggcaataatcaataaaccgacactcgctaacggtaacaaccataatgaatcttctcgtatataccaataaaaagaaaaaattattgataagcccagagaccacaaaataaacggttttagctttccatttcttctaaaatataatccaataaggcaaccaactactaataaaacagccggaaccacgagcgtattccgataaattctagtgctatattcactcgtaaaagtcactggtgaatataaaaagaatgtataaacaaacgttagaatccaccgattttttagtaatggtcgtaaagcgattgctgctatcgaactagcgaatatattgaacagacccaaaagaaatccatacgacaggtgtagcttattagcccaaaccatgaaaaacgaataagatactcccttagataaggtttttgttgaatattcacctagccaatttccctttaataattcttcactgtaatgaataaataattgatcatcataaccagcaaataaattgataaaatagggggattttatgctcaacattaggcgaaacatcgttaacacgatcaaaataattaaccagaataaattacttggtcgtatcactttttttaaagcaaaagtcgtatcactttttagtttttgcatcaaaaatccctttctaatctttttacatcaagctcttcaattctacatctggatacttatctgcaaaccagcgcatcgcaaattgattttcgaataagaatagtggttgatcgaaacgatctttcgccaaaatattgcggcttgagctcattcgttcgtctaattgttctggatcaatccaacgagcgattttgttacccatcggtgtcataactacttccgcattgtattcatttagcatgcggtgttggaacacttcaaactgtaactgtcccacggcgccaataatatactcgtctgttaaataggttttatacagctggatcgcaccttcttgaaccaattgataaattcccttgtggaaggatttttgtttcatcacatttttagcagtaaccttcataaataattcaggcgtaaaagatggcagctcttcgtaagcgactttcagttttccctcatataaagtatctccgatttgatagtttcctgtatcatagactccaataatatcgccggcaacagcttcctcgacattttcacgagcatccgccataaattgggtaacgttacttaatttcatttttttaccggtacgaccaagggttacatccatcccacgttcaaaagtacccgagcatacccgaacaaaagcaatccgatcacgatgatttggattcatgttagcttgaattttgaaaacaaatccagagaactcttcttcataaggagagactgcctctccttcttctgttttatgagcatgcggtttcggtgcaagatcaacgaatgtttccaaaaatgtttcaacaccaaaattggttaatgcagaaccaaagaagacaggggtttgatctcctcgttgaattttctcaagattgaattgatctccagcttctcgaactaattccacttcaccgatcacatcttcataaattgatttctccttcaatggatgttccccagcgatttcaccatccgtcaactttacaaatcgttccccttcatattgttcagggcgataaaattcaattcgttcgttatagatatcgtaaattccttctaagccctttcccatacctatcggccaattcataggataagactctatatctaataactcctccagctcttctaataaatctaatggttcgcggccatcgcggtccagcttattaataaaagtaaaaatcggaattcctcgacgcttaacaacttggaaaagctttttcgtctgcgcctcgattccttttgcgctatcaataaccattacggcactgtcgactgccattaatgtacggtaggtatcctcagagaagtcttcatgccctggtgtatctaaaatgtttactcgttttccctcaaaatcaaactgcatcacagaactcgtcactgagattccccgttgcttttcaatatccatccagtcagatttcgcaaaatttccagtttttttccctttaactgttcccgcctggcgaatcgctccgccgaataataatagttgttcagtgatggtcgtcttaccagcatccggatgggaaataatcgcgaaggtacgacggctgtccacttgttgttttaaattaggattattcattctattgctccattcatctctttcaaatttcaacccaatcagtatagcatggattttactctattggaaagttgaatcgctcattcttaaatgttgcctaacgcatacattatcaggcatttttaaaaatctaggaaaaagcagttttgaaaaaaacaggtcttaatctccgaataagagattaagacctgtttagttatcatttatctaacggcgaggctcgtcatcctcaaaatccttagtaaataggcgacgttcttcttctggttcagcattctcatgttcttccggatggaaaattgcacgcaaggtcaaaacacgagatccttccatttcttctgagatcaaagtcaaatcgtcaacatcaaacgaaagcttttccccttgatcaggaattgttcccaaagctgtgatcagatatcctgccatcgtatcgacgtcactcatatgcaagttcaaaccaaactcttcgttgaactcgtcaatcagcatcttcccattgatcaagtattcgttgtccccgactttttcataaagcttctcaacttcatcagattcatcatcgatttctccaacgatttcctcaagcaaatcttctaatgtgactaatcctaccataccaccatactcgtcaagtagaatcgacatttgattttgggttttcttcaattcatataataaatcatcaatgaaaatggtttctggcacaaatagcggttcttgtaaaatcttttgtaaattgacattttcaaaaccgaattggcgagctgccttcaataaggttttagtgtgtaaaatccctacaactttatccttatcatcatcatatactggaattcgtgaatagctttcattcaaaatctcatcaatgctttccaatactggatcattgatatctatcatgaaggaatctgttcgaggaaccattacttcgcgagcgacctttgtatctaatgaaaagacaccttgcagcatctcgatctcgtcgttgtccagcacaccttcattttctaacatataacgcatttcgtcacgggtcattctagtgtcttcatcatcaaacttcatcggcgtaatctttgccaataagtttgttgaagccgttaacaaccaaacgaaaggttttgtgattactcctaatttacgaaccacgccagaggtaaattgtgcgacttcctcggtcttggtcatagcaattcgtttgggatataattctccaaatacaattgatacataggtcaataatatcatgacgatcgccgcagaagctgtccgcgcaatcgcacttccgcctaataaaggcgtcaaacgagcagacaagctatcagccaaggaggcccctgacaagatgttgactaaagtaatcccaacttggatcgttgataagaaattattcggactttcaataacctctaataatctttttgattttgggtttccttcatccgccttttgttctactcggtttttattgaccgacaccaccgaaatttcagctgcagctaaaaatccgttgattaacgtcaaaattactaataaacctagttgtaaaattaacgactgactatcggggtcagcattcataattgcattcgctccttatttttaagtgtaaaaaaagtggcacaaaggccacgataaaatcgtatcacatcgcttctttttatgcaatcttttccgaataaagagcgatttgctaacttaaaaattcttgctctcgttcttcttgtttgctttgtttaactattttaaccacaaaaacaactaatgtgcgtaaaatagcataaacaggaacacctaaaaagacacctaatatgccagaaagatttccggctactaataaaattaaaataatcgttagtggatgaatattcaacgattttccaattacattcgggtagattacattcccatcaatctgctgcacaataattacaaccactatacagagtaaggctcttgttggcgaatcaaaaaatgtgtagatcaatgcgggggccaatcctaaatacggtcccaaataaggaatcaaattcgtcaatcctgcgattactccaaataagaacgcatagtccacgccaatcagcagataacctagaaacgtaaatgttcccacaaacaaacactcgattgcttgtccgctaatataatcagacaaggttttatttaactgctgcaagagtcctttgatattttctctttgcttttctgggaaaagacgttcaatattgggaactaatttttcgccgtccttcaacatataaaataaaatgaagggaaccgtgacgagtaataagactatcgttgtaatcttgcctatcactgaacctaacccgtttgtcacgcccgttaacgactgctggattatgcttcctgcagagacatctaaattgctaatgtacttgtcaacgtctaattctttaaatagcggaaaacgtgtcgcattattagccaattcttgcaaccaagtttgcatattactgataaatcctggaatattcctagctaaggaaactagctgctcaactagattagggatgatactcataaaaatcagcacgatcattccaatcagtaaaataaagattaatgcaattgctgctaagcgtttgacacccattttcattagtaagttcactaaaggattcaataagtaatacaaaaagcctgcaattaaaatcggcgcgaacaacgtagtaaaaaatgtgcctatcggctgaaaaacaaaatcaatttttgaagaaaccaaaatcaatgtggcaataatcaatagttcaaccgaccagaacattaattttgaatttttaattttctcaaacattcatctactcctttttttagatttagtttatagtatacatcatgtgaaagaaaatccccttgaggaaggtgtcattatgaaaattttaatcactaaggatacaatgagcgaaatctatctcgatgccgttcgtatccgccaaaaagtctttgtacaagaacaaggtgttcctgctaatttagaaatcgatggaaatgaagcctattctgttcatttcgtactttacaccgacgataagaagcctgcagcaactgtgcgactattacctctgaatgaccatacattcaaattacaacggatggctgtgttaaaagaataccgtagaaaaaatctaggttctgaaatcattacagaagctgaagcatttgccaaacaacagcattataaaacaatcgaattaggcgcacaattatcagcggaaaaattttacaaaaaactaggatacattacttacggtgaaatatttgaagacgctggaattgatcatgtgcatatgaagaaagaactgcaaacattttaaaactaaaaaatttttttctacttccatgcattcataaaaagctggcaaaaaagactgtaccatttctggcacagccttttctttctactttcgcgacaattgcttgtaacgatcataccaaatatcaatatagccttgagaaaaaggccccttttcattgttgatccagtccactaagatcttgacattttctttgagaatataatcaatttctttagagtaatgcatttgctgactatgggcttcatattcatccacgtccaacagacgtttctcgccatcgggaaaaactttgacatctaaatcataatcaatatactttagtgcctcgtcatctaatacataaggtgatgctagattacaataataagaaactcccttctctcgaatcattgctattatgttgaaccagtatttttgatgaaaataaacgattgctggttcgcgagtgacccatcttctgccgtctgattctgtgaccaatgtgtggtcattcaagccaatcagtgaacactcacttgtttttaataccatggtatcacgccacgttcgatgcaaactgccgtcgtgcttgtaacttttaatcgtcacaaactctccttcttttggaactcccatagctacccttccctcagcgaaaaaattttcgcatttgtttgggtgttatcacaccgacatcagaattattatagcaataaaatgaaagattgcctactaatctttgtcatcggataaataattttcaaaaacttccaacattttttgctgtggttttggaaaaacatagccagaaaattcatttggtttcacccaatggcctttgagtgttaaaggtgctgcacttcgaccgtagaaaacaagaatatgccagcgtaaatgactaaagacatgcttaacctctcccagaacctttttttgccaaataatattttgagctgaaaagaaatcaggactgtcttctgcaatctgtgaactagaaaataaatcccagcttttaggatcatattgctcctgcaattcgctgaatcgttctactgaaacttcttctaaaggaaagagccacatatttgctaataaccctgtttctgggcgttgttgaagaaaaatctcttgttctttattttcaataatgccagctacgtaatacacatcttttggcttttgctttttcgatttcactggaaaatcggtttgacgatcttctcgataagcctgacaaaattgctgaatcggacaaatttcacattgtggattcgtaggtgtacagatactggagcctaaatccatcatcgcttgattaaagtcgcctggctgcttttgactaatgatcttgcgcatcgcttcatcaaaaaaggttcgactacttgctttcgcaatatctgcttcaatacaaaataatctactaacgactcgcatcacattcccatcgattgcaggttctggaatctcgaaagcaatactgctaatagcgccagcagtatatggtccaattcctttaagtgaacgaatctcttcgaccgttttcggaaactttccgccgaattcttccataatctgttttgccgcagcctgcaaattacgagccctagaataataacctaacccttcccaaactttcagtaatttgtcctctggtgcctctgctaacgcttgaatcgttggaaattgctccataaatcgataaaaataatcaatcacggtatcgactcgtgtttgctgcaacatgatttccgagatccagatgcgataaggatcttggttgtaacgccatggaagatttcgcttttcctgctggtaccattctagaaaagcttcttgaaattgttccacgtctgaagctgaccaattttcccaacctctactcatctgcttcctcttttccacgaataaaggcatcgatctgatctagctgaaatcccttttgatacaaactctgtttgaccttttgtcgccgttttgctggttcaaatcgctgattcttgcgccaaagcttctcaccctgaagctctaatgcatccgtctcttgctcctcgatttcagaaaaatcaagttcggctaatacatttttactgatgtcgctgctgaagccttttgtcatcagcaattgctgaatttttcgttgaacttcgcgtgggctgctatgatgaaattttcgcatcgccttttttgctgtatgcgcagcaacttgaaattgttcgtctgcttcataaagatataacgcgtgttgaatatccgtatcgttcagccctttttgttttagcttttgctgtaaaactcgtggtcctttatctcctatgcgcatttgcgtgcgaacatagctttctccatagacaagatcattcagtaaatccatttctttcagacgaacaacaattttttgccgatcagcactttcgatctcattctcttttagataggttcgaagttctttttccgtccgtaattgatagcttaaataatttaaagcaagttgaaatcccagatcttctttgccctcctgcttaatctcatctagcatcttctcatctagctcttggcctttaagcaagcgatgacgtacaactgtatcttctgacaatcgcagcttttcgccattagaaaattctactttatagtaaggtccacgaccttgactgatttttactaccgtcagcatcttatgtcctccaatttactatttctatatatactcctcatccgcctagtggagaatagtattaatctcctcacaaaaactaattctatcacagataatcaaccaatcgataaaaatatgctaaaatgaattgcgcttaaaaagctgaaaaaaatttgagaaagaggctaaccatggctgttcaacttaaacctaaccaaacattaaccttgaaaataaaacggctcggtatcaatggcgagggcatcgcttattacaaacgtctgattattttcgtcactggtgcgttaccaaatgaaacggttatcgcacgaatcactaaagcaactcctcgttttgcggaagcccgcttagtaaaaattacgaaaaagagtcccgatcgtatcacgcccccatgtcctgtttatgaagaatgcggcggttgtcagcttcaacatctagtctacagcaagcaattagactttaagaaagatttattgcgtcaagctttagagaaatataaacctgaaggctatcaaaaattcgaattgcgcaatacaattggcatggatgatccttggcactatcgcaataaagcgcaatttcaattgcggaaaaataaacgaaccaatcaagtcgaagctggtctttatcaggcggattctcatcaattggttccgatcaaagattgcttggtccaagaaccaacaacgcaaaaagtcatcaatacggtagtaaacttattaacaaaatatgatctgccgatttatgatgaacgttcaaattccggtattctgcgtacattaatggttcgaattggtgttgaaactggcgaggtccaattagtcatgattacaaaaacaccgaagctgccgcaaaaaaatgcattgattcgagaaatcacgaatcgtttgccagaaattgtttcaatcatgcaaaatatccaagagaaaaaaacctctgtcattatgggggatgaaaccattcatctttggggcaaagaagttatcaacgaaaaaatcaatgaagtcagctttgaactttcgccgcgggcgttcttccaattgaatccccagcaaacgaagatcctttatcaagaagccatcaatgctctggatttaacaacgcctaaaacagtagtagatgcgtattgcggtgttggtacaattggactgtcattagctaaaaaagccaaagaagtccggggtatggatgtaatcccacaagccattgacgatgcgaagaaaaatgcggaagcaatgaacctaaccaatacccgttacgaggtcggaactgctgaaagcttattaccaaaatggctaaaggagggcttttcgccagatgcaattgtcgttgatccgccacgaacaggtctggataatcaattgcttaaggcgattcaagaatcaccaagtccccaaatggtttatatttcctgtaatgtctccactttggctcgcgatcttgtcagtcttgcaaaaatctatcatatagactatttacaatctgttgatatgtttccacaaacagctcgttgtgaggttgtcgtaaaaatgtctagaaaatagtaactatcagagattcagcttttgaaaaatcgataaaaacaaagcgttcctatttctatcgtacgtgatagaaataggaacgctcgttttttaggttctataatattttgtgttggtggaaaatcgaaagcgattttctactaacacttttttcttcgtttcaactcaaaaagagactcacttttggtaaaatttagtcgaccaaaacgtcaccctaccaaaggagtctctcaatggataatcatactagaaaattactcggattaacagataaacatttattttttgatgaagaatggctgattgaaaaagaatataaaggcgttcaagcgcagtttattaaaggaaaattggatgactctccttcctgttgtgaacactgtcgatcggttcgtattatccgcaacggttcctatacgacacgcactcagatgttgaaagtcaaagaaaagttaactattttagaattaaaacgtacccgttttctctgccatgattgtggacggaccttttctgcgaaaacggacttagttgatgaacatcatcaactaacaaaggaactgaagcaggcgattctcatggaactgtacgaaaatcaatcacgtaaactaatcgctaagaagtacttcgtctcggatgggacggtgacacggatcttgcgtgaagcaacgaagcattaccagccacgtatgaacttccttccgacggtgttgtgtatggatgagttcaaatcaatgaagtctgtttctggttccatgagttttatttgtgttgatgggacaaccaatcagctatttacgatccttgaagatcgcagactttacaaactaactcaatacttcctgcgctttcctagaaaggcccgtttaaaggtcaagtacctagtgatggacatgaatgccagctattgtcagttgcttaaaacggtctttccaaatgcggagatcgtaactgaccgctttcatattgtccaacacatcaatcgcagcttcaatcaattacgtgtccatatcatgaatcgttttcgaacctcacactctgaaaatcagaagaagtaccgtcggctcaagcgatattggaaactcttactcaaagattctacgacattggagccactcaaacggcattatcatcgactgtttaaacgaccaattagtcaaacagaaatcgttgatgagctgttaagctacaacgaagaattgcgaacggcgtatcatttttgtcaattattacgctattatttcgttaaacgaaatacggtaggctttcaagaaacccttaaaacaatttcatctacgttacctcagtcgtttaaaaagaaattcacgatcttccatcgctaccaatcgggtatttcaaatgcctttaaggtgtcccactcaaacggcgtcactgaggggctgaataacaagatcaagctgattaaacgaattgcgtttggttatcgcaacttttataactttcgggcacggatctatttacaacaaggtctgatctttgaaaactaaaaaaatatgcggcgcacagaacgcgccgcatatcggactaagttttattcaaatttgtcttcaccaacacgatttgacgaagagccgttttttagtaaccagcagcgggctggccgtaaacatcattttgctgtcctgcgttaggatcagtagcaccaccgtaaccttgatttggatctgtatatccttgatcatattgagtagaataatcatcggattgttgatagtcgttagttgtatttgaagaatcaccataaacgccactgctgtcataattattcggattatcatagcctggcgcaaattggctggtgtcttcactggctttgccatcagagtcatcatagaacaaactatctgcatcttgttctttcaggtttggtaaagtgcttgctgtaggcaaatctaattgcttcttcaatgtgttctgaatatctaataattcatttgtacctaatatttgatagtaaatttcatctatcatctgactcttaccaaccaattgtttttgtttgatagtatcaaatgcagataaatagttcgttccgatatccatcatatcatcccatgttagatcggttttcatatttttttcgactgcttttaagatttttctatagttacttacaccattgattgacatcgcttttcgtaaaattttggttactacttctcgttgacgtctttgccgtccaacatcaccttctggatcttcataacgcatccgcgcataggctaagcccttttctccatccaacgtttgttttcctttaggtacatgaataccatccaaagtaaaatcaatcttattattgacctcaataccgccaaccgcatcaatcaagtcttttaatccacgcatattgatcgatacataatggtccaaagggatatctaacagtgtctcaattgtatccattgacatcttgacaccaccaaatgcgtaggcgtgatttaatttgtcattcgtctcatacccaacaattttagtcaaaatgtctctgtctaggctgacaattgttgatttcttttgcttgggattgatagtaacgaccatcatactatcagatctcccctgatccgagcggccaagatctcctgtatcgactcccgcgagcaaaattgaaaaaggctccgcattgtctatattgggtttgtctccctctcgcttcaaacttgtacgtttaacagtttgtcgaatactatcaaccattttactggcatcatttgtcacttggacagcatagtaggtaatcccacctataaataaatttagtaggactaataaccctacgatcactttcttccaacgactcatcatacacctctattaacgattttttcgttttattttctcatatatcagctatctaatcaacaacagctaaaaacaattaatttcaaataacagaaacttaaagaatattaatagctggtttgctctttatgttcgatttataccataaaattatgaagatttttggaaggtcttaaaatctaggctaaaaaaagaggaagattgaccatgccaatcttcctctttaatagttgattatttagcgttcgctaagttttcatttgcttgatcccagttcacaacgtcccagaaagcagcgatgtagtctggacgtacatttttatatttcaaataatacgcatgttcccatacatctaagccaatgatcggtgtttttccatcagttaatgggctgtcttgatttgcagtagaagtaatttctaattttccattgttcaatactaaccatgcccagccagaaccaaaacgaccagttgctgcagtcttgaattcttccttcattttttcaaagctgccaaatgcttgatcaattgcgtccttaatcgcgcctgtaggttcaccaccagcatttggagccataattttccagaagaagctgtggttagcatgtccgccgccgttattacgtacagccgtacgaatgtcctcaggaacttcatttaagtttttcattagctcttcaattgactgttcttctaattccggatatttttcaatcgcagcatttaaatttgttacataagtgttatggtgtttgtcatgatgcaaatgcatcgtttcaacatcgatataaggctccaatgcatcgtagccataaggtagatctggtaaagtataagccatagttcaagttcctccttaaatatctttatgctttaactgtaacaaacaatgcaatgttcttcaaaatatatgcctactatggcgaggaattcgtttcctcgtcttcaataatctcaacttttttgaaaatgaagactttactaaaaatataattggcaacgacaacgacaatttgcgtaataatctttgcaactagatttccggtattaagtaaatcaataaaaatatacatcgtagccatatccattccaaaagaaacaaccctagcaaagatgaacttactaaattcccatattaattctttaaaattctcagattttgtttgaaagacccaaactttgttggtaacaaaagcaaaaagaaccgaaaaaatccaagaaattgtatttgatattggccagctcaaattaaatatttgatatgagaccgtaaatgttacaatgttcactacagtagtcagtccaccaaaaaataagtatataaagatttcccacagtcttttttcttctaagtaacttctaaatgatcgataaattttcatgattactcactttcttcttcttctcttcttaaagtaagatatcgaagcttagaaaaatagtcaattctttcttgcattctttttacatttttacagatcgccttgttatttcaaccttacttcgctacaatggctcttgtataaatagattggagcgatcacatgacttttcgtcaattaatcaaaggatcccttattcgttttgaggatctaaaatcagcaaaggacacgcccttttggaaatcgatcgtttatctactagggttgagtttgcttttggcaattccgagtgtctatcaggcccttcaggtaatggatcaactgaaaaccgacagcttagagattgttgaaaaaattcccgactttaggattgaaaatggtgaaatcaaaactgataaacctgagaaaggatttatttatcaaacagattcaattattctgaccttcgatcctgaaggaaaacgtacgcgccaagatgtcgagaaagacttgataggaaattacttcagcgttggactgttaaaggaccaagctataattgtacttcccgattacggcggggtcagctcagcactattcggcgataacgtccttaaattctcctataaacaggaacctctaaaaagtatgactggggataaattgagaactggtctaaaagatttgagaatgccaatttggacgcctttagtgatgctattggcaggtctttatccttccttcatcaacttattcgttacattaatttttgccggtattgctggtatgatcgtagcaaaattaaggttgcgccgtgtgactttttttgaatgtttcaaaacaattatttattgcgcaactatcccaacaattttagcaacccttgttttattgtttcaaccaaactttgactcaagtattttaattacgttcatcagcttgtttatctttttccgagtcatcaatcacttcccaaaaattgaattgccaactaattaactgcttacgattctgtaagcagttttttttcgcaagctttgataaaataaatgagacgattctatttgaacatgaaatgaggcgtaaagatgacaaaaccaattattttcttacaaaaaaaatttcgcgaggaattcactgaaaaaattcaatccatcgctcctgactatcaaatcaaaaacactttgactgaagaagattttgcagccgtagaaatatctgtggggtgggcagagaaattcgaagatcagttattagcaacccaaaaattgaaatgggtacaatctatttccgctggtgtagactatttaccactagataagttctcagaacaggatattttattatctaatggcagcgggattcatgccctttctatcagcgaacatattattggcgttctgcttggctattatcgcggcttgaacgaagctgtaaaaaaacaaacccaaaaagaatgggctcaaaaatccattcactatgaccagcttgctgggaaaaatttactagtcgttggtaccggacatattggtcagcaactttcgaaatcaatccatagcttaggcgtaaatgtttttggtatcaatacaactggacattcagtagagggattcgcagaaacctattccatcaaaaatatggctaaaattgtcccagagatggacattgtggtagggattttgcctggcacacacgaaacctatcatatttttaatagtgatatcttcgaaaaaatgaaaaagtctgctgtatttgtaaatgttggacgtggggatactgttcatacgaaagagttgataacagcacttgaagaaaagcactttgactttgctgcccttgatgtttttgaagaagaaccgctaccaaaagaaagtccgttatgggaatttgataacgttttgattactccgcatatttcaggaatgactgttgattttcaaaataaatttatgaaaatctttttgagtaatttaaaaagctatgtttcaagtaaagaattgactgtgaaccaggttgaagtgaaacgaggatactaaaaaagttggagattatttctccaactttttttcagtctccttaacaatataaactggacgtttttttgtttccataaaaatcttcccgatgtattttccaataatcccgatgcacagtaattgaacaccgccaatgaagagaatgattgttaccaatgacggccaaccagatgtcggatcgccaaataataatgctcgaacaataataaatatcattgcgattcccgaagcaacacaagaaaaagctccgacaaaagaagctatattgaggggcacatcagaaaaatttatgattccatcgattgaatagttaaacaattcccaaaatgaccatgaagattttccaaccactcgctcttgattctcaaaagaaatatattctgttttgaagccaacccaactaaataaccctttagaaaatcgattatgttcagtcagttccaataccgcgtcaaccatctggcgtgtcattaaacgataatctcgagcgccatccaccatctctgtctcactaattcgattaattaaatgataaaaagctttggcaaatagatttcgaataatgggttctccttttcgatttgaacgtcgcgttcctacacaatcaatatctgatgtctcgatcatttcaatcattctcggtaataattcaggcggatcttgcaagtcaacatccatgacagttactaagtcacccttagaagcttgtaaacctgcatataatgcagcttctttaccaaaattacgtgaaaaagagatatagcgaacgaaatcgtttctcttagctaaatctcgtaaaacttccaatgtttcatcctttgatccatcattgataaaaatatattcaaagctatgcgagacttctttttttactttctccatctccgtaaaaaaaagaggaatcgcttcctcttcattaaagcaaggaacaataactgatatcattttgtatcaactcctaaacttggataaagtcgtactttggttcatccaagactgtgtcataatcaacaacgaggtcgtatcccttaaaaaaccattcatcggcttcttcaatataaaacaattgatcaccaatagttgtttttacaagtggactatcgattgtatccaccgacatccccacagaaaagccatcatgaacctgagttttcccatagactttcccataaaatttaattccttggccatcgcttaattcaatttcacgtttaaaccattcttgcgcttttggggttattgttaacttcatttgaaaatcacctatccattcattttttcatctaaataatccacgtcttcatcacgaccaatcaccactaaatgatcgtccttttgcacaacttcttctgcaggtggtgtcacgattggatcttgattatcccgacgaattgctaccacatttagtccaaatcgttgacgaaaatctagttcatctaaggttttaccataaaatttacgattggtcacattgatttccgccaaagaaaactcatcagataattctaaataatccaaaatattcttcgaaaccaggttatgagcgattcgttgtcccatatcccgttcaggatggacaacacggtccgcgccgattttttctaagacacgggcatgatattcattttgtgcttttgccagaatattaggcacacccatttccttgaccattaaagtcactaagatactcgcctgaatatcctctcctattgctacaatgacatggtcgaaatttcgaatgcctaaagaacggagagtcatttcatcctgtgcattcgccacaactgcatgagtagcaatattcatgtattcattcacacgatcttcactgctgtctatcgccaaaacttcctgaccggattccactaatgtgcggcaaatactcccgccaaatcttcctaaaccaataatgacaaaactttgcttcatgatatctccttaatctttcaatatattatttatccaaataacttgaatctctataccagcaaaacttacatttcctagtataacaaagagcgggttaataaaacagagatggactctctattttattaacccgtgcttaaaggcgtagatcgctgcttgtgtacgatcctctacttctagcttcgctaaaatattcgatacatgcgtcttgactgtttttaaggtgataaacaattcatcagcgatttcctgattgctcattccttgagcaattaatagtaaaatttcttgttcacgattcgttaattcttcatgaagaacatgacggtttcgattggataattgctccatcatcttcgtcgtcacttctggttctaagacacgctcaccattataggtcttacgaatggcattggcgatctcatgagcggtagatgttttcaacaaataacctgaggcgcccgcttcaatagcaggataaactttttcgtcatcaataaaactggttacgattaagattcttgcttctggccactcttttagaattttcttggttgattcgatgccatccatcacttccatcaccaagtccatcaaaattacatctggacgaagagccatcgccttctcgtagccatcttcgccattttcagcttcccccacaacctcgacatctgattgaatcgataggtaagaagaaacgcctaatcgaaccatttcatgatcatcaactaacaatactcgtatcatcctctgcctcctagttcttaataatctattttatttctatgctgtctagcataccgttaagcaggctcagtgtcctctacaacaggaactttgatttcaatacttgttccttgacctttaaaactaattattttagttgacccgccaacgcccgcaattcgttcacgaatgttgcgtaatccataactaccagcgtgctcatctttggcttcaaatccgacaccatcatcaattacacgcagcaaaatactttgaccaacgattttcaaataaacctctaattcattcgcctttgcatgacgcaatgtattggacaataactcctgcactactcgaaatagttggtcctcaatacttggtgaaacacaaatatcctgaacatcccattttaactgaatttgaattttagtctgtagttcctttaataattgctcaattccttgacgcaaacttttgccttctaaactgattgggcgcaaatgaagcaacaatgctcgcatttctgattgcgcagcattgataatatcggctaccatcgccaattgcttcttataaggctccaactcttcagaatgctgggattgttcattcaaggcggacatcatcatcattgccgcaaaaagctgctgagaaactgaatcatgcagttcccttgctaaacgatgacgctcttcttctaagattttttctcttgtcgtaccatcaaccatctgcggctgactgcttaactgctgcagctcccgtgacatgctcactaatttttctttaattcgtttgatatcatgatcgactaacagcatctctttattttgtgaaatcgctacatccaaagaaggttgttcatagtcacctgaagccaagttttgcaattttccttctattttccccaattgccgcttttctaaaaatgtcacgagaaaatagaccgctgcgcataccgtcaaagaaatgacaataatgtgaacaaataaaggaatgtaaaaaattcgtgcaacaaataattgagcaaataattgccttttccctatcgcatacatatacagaaagagggttgtcaaaatcagtaaaaaagaaatcagacccgaataaagggaaatttgtaaacgagaatatttccccatcatacacgaatcacctcgacatctcccaccaatgtattggtcactattttcaatctacgaggactctcatcataatcctcgctatacattttgattgtttcattgcggagaacttgcgtatcctcatcaaaatcaaccttgccataaagcgttgcgtgctcaaaaagaattccaataccataaggaactaaaattcgtgtccgaccaaagcctttacggacaattacgatgctatcttctttaggcaacaatgtattccctaagtcaacgattgtgtctccggctaagattgctacattaatatcatcccactcaaaaacttgtgttccgattcgatcatttccgatccagctttgtttccttcgttcaccattatgtcctgtcggatctgttgtttcaaccatcacaatgctttttttattcttcaaagaatggtttggcattgaaatacccgcaatttcgaaacccttaagtccaagaaatattactgcaaaaatcaacatcaaccaagtcgcaggactattcactaaacaaataatcaaaattactgaacctaagattaattgaaattttcgacgacggtgtttacgcaatgcccagtatatatttaatgtgccaaaaagcagcatgatcaacatcgcaggatttgaagatagttgccataataagaaaattgcaagtaaggcttcaattacaatgaaaaagcgccatggacttttcatcttgtctttcctcccaactttttatttataccttattctactttttttaaagtctaaataccatcggtctaaagtcgcaacctctttaaaccctaaaagaaaagaggcgaccagcgcctctttcaaccattcttagttttgcttgacatctacgatcttaacttccatgttaccaccgggagttgcgatcgttacgatatccccaatacttttaccaatcaatgcctgcgcgatcggtgaatcattagatatctttccagttaacggatctgcttcggcttttccgacgatcgtatattcttcctcttcttcatcaggcaattccacaaaagtaactgtcttaccaattgagatctcatcagaatcaacattctcgttatcaataatttgtgcgaaacgaatcatattttccaaagtactgatacgtccttcaacaaaggcttgttcatctttcgctgattcatactcagagttttcagacaaatcaccaaagctgcgtgcaattttaattcgctcaatgatttctccacgttttactgtttttaattcttctaattcctgctctaacttgtgttttccttctaaagtcatagggtatgttttttctaccatttttcttctccttcaatcaacaaaattacgaaaggtaatcttttatagatttaatccacaaaagattaccacgtaattactgtaatgtaaattgtttatttctctttattgacatatttttcgaccaattccatatgctcttcgtaagtcttcgcatagtatacttttcctgttgagatatctgcaacaaaataaatataatcattctccgttggatcaaggacagataggattgcttcttgacttggattgtcaaatggccctggtccatatccagtattcgtatataagttatacggcgagtccacttctgtatccttaatcgtgacaacttctttatgctcacctaaagcgtaaagaattgaaatatctgattgtaagggcatttgtgcttcaatccgattaaagaagacttgtgcaattttcttacggtcagattgagtgaccccttctttttcgaccaacgaagccaatgtcatgacctcttgaacgtttaatcccttttccttaatttgactataataaggtgttaggatttgattcgtcgtatctaccatttgagttactaaatcttcaagactcctatttttatgaacattataagtcgctgggaacaaatatccctctaagcgataacgaacatcctttgcgttacctgcatccgttaataggtctggatactgcgtttttagctgttcgaagaatttatcatccttcataaccttgataaaatcttccttcttgaagtctgttttcttcgcgactaaacttgcaatcttatcaacatcataaccttcaggaacagtcaatttcgaagcatcatctaacggctcggcacttccaccttgctgcaattctttactaatttgatccagcgtcatattaggagaaaattgataataacccgcctggaagttcgttaggtttttgaatttcgtatagaaattaaaaaccattccatctcggatcacttctccttcttctaaaatgtcaccgatttgacggttcgatgagccgctcggcacctctacctgaaccaattttttgtcatttttatccagcggtttcaatccagcactaacatagttataacccgaaatcgctaaaatccctgcgacgatcaaaataccaatcgtcaatatataaacaattttgcggacgactcgatcctctttgcgacgttctgctcgtttcaagttgctctcctcacttaaatcaccttcaaagtcttcatccatattacgaagatcatcaaatttctcaccaatacgttggaaaattgatggctcttcttcaacatgctcatcatgcttcgactgttttatcccctctgccttttctttcttcttagatgggacagtcttagccgctcgttttgattcgtcacgacgagactctgctttcttttcttgaattactgaaggttctttggtttgctctttttttatcggactcgttttctctgctgtagacttctttctctcttttcttatcttagactttgcttcagagttatcaataggacccttttcctctgattctttttctttcttcagaggttcctctttttttatctcttcttcaatcggctcagactttcgctcagcagcagttgattctttcttttgtctattgccaaataaacgctcataggacgaagccagttcgtcatcatcactagtatcgttttttgttttcgaaggcccagcggatattgaactcgcttttttcgttggttctacttcgcggttctttcggccttcttctaaagcccgcatgatctgctctttaaaagatccttcttccgagtgttggttttgatcctcagacaaaaacaactcctccttacttcatgtcataacttaaaccattatacatgaaatgaaagaggagggaaatgtaaaatttatttagttaaggaaattatatttttttcatttgccttaataattacgaaaactgttagagtaggccacactaacatgtatggatatacatatctcactaatgttaccggtcctaatagcagagtaccataatataaaataagaaaaacaaatataaaatagaagtcccttaaaccgttataaattgaatacaaacacgtcactaaaagaatccatattacaaaacctgaagaaaacaataatgaaaagagaggtatctttttataactattttctgtatagaatctatcaattattttttcccttatacttggtaatttgctatcttcataaaatcccttagacaatactgtattatacgttttcaattccactataggttgcttatagaatttatctggaaactgtaaattcggatcccaatagccttgcgtaagcataagaaaagcatctaaataattgcttttattttttcgacctatcctcgcctataattttaaaaatttgatgcttgtattccctttatgcttcaaagtaaaagagccttttacataatcagagattcttggattataatttctcagattaacttctggaacataagagaataattcttccttttcctttttggaaaaagaatctgggttattgatatagcttcgagctaactgctgtaaaggaacactatacatttgtccttgcattcctggtctcgcactagtaattactacaaaggcttgattagatacaaaagtaaaaaagattcctagaatgaaaacgaataacaaattattacgtttctttcttttcttcgtgaaaaggataaacggtagggttcctaaaagtgcataaatagcattatttcgaaatagtccaactaaaacaataattaagatgagttcaatagctttattcctacttaataagttcttttcaaaaatatagtattcacatagtttaaatatcaaaagaaaaaagaatgtggaaaacagtacatccttagtagctacaatagaaaaaatcatatttaacggaaagaacaaataatatccaactagtaaatagtaaaagtttctattcaatttatagtgagatagtctactacaaatatatgcattaatcccaatacatattaacatttgaataagagtataaatcagcccacctaagttatagtttccaaatatttttccaattacaataactatatttatcaaaagtgtatgaactatcggatggtgagtacttatatcattattaaccaactccgacatttgcatcggaacatcgtaagaaaatattcctggccaaaatatgaataacattggcatccaaacgattaaaaataaaaagaaaaaaaatcgaaatccataaactttattagtgctattcttcattttgtcaaaggtacttaaattcaataaaaaaattaacacagaacaaattaaaatgctgatgcctaagactacgatcaaatttttaagaatgctagaaatcgaatagaataacctagaatatagtatgagttctcgtcctacctttaaaattagtgaaaaaagaagtgctaaagatccacaatacttaagtttttttctactaacaccggaaaaagaaaatttataaaaataataaattgggactattaaaaaaatccataaagaattctgcataattgacgatacttctgtcaaaggataattatatggaaatacagaaaccgtaaatattgataatagtagaaatcgactatccgatttaaaaaaattatttttcatttttcactccatacagtttgtacaagtttaattcatacatttttttatccgctctcactacagtatctaaagttaatcctgtaacaagtaataacattgaaaaagtcattaaacccgttgctaaaattgctgaaggtatcttgtcaatgaaacctgttcgaacatattcactgattactggtattcccactaataatcctaaaataaaaaataacgcaaaccacattgtaaaaaagaaaagtggcttatagtctttacacattttaaaaatagtcattaatactttggttccatcagaaaaagtgtctaactttgattcactaccttctggacggtctcgataatcgatgggtatttcaaccaacttaaatcttttatctaaagcatgaatcgtaaactcagtctcaatttgaaatccactactcattacaggaaaacttttgacgaacaatctgttaaaacctctataacccgtcatcacatctttgatattagctttgtaaagccaattaattgaattcttaaccaaattattcccaaaatcatggaaggctcttttattttcgttaaaatatgttccatttgacaacctatccccaataaccatgtcagcccgtttttcctttaaggcatgtaataaatcgtgacaggcttctgctggataagtatcatctccatccaccattaaataataatcagcttcgatatcaaaaaacatttgacggatcacattcccttttccctgtctgggttcttttcttacaattgctccttcatcaaacgcaatttgataagtttcatctgttgaattgttatcataaacgtaaatatctgctttgggtaattctctttgaaaatcattgattactttcttaattgtcaaagcttcgttataacacggaagcagtatcgctattttttcttccatttttactattctccttaaaataaacactaacaatagaatacaagagtttatgaaatatttctataccttataaaaatattttgaaatggtagttttttcaattaaatccttttaaaaaaaagttaacttgaaatccaaaatctctttccaagttaacgtttttgattatatcaattcttctgaaactaaatattttttcataccttctcgaacactaaaactaggtgtaaaacctaaactctttagtctagagatatcagcaactgattctttaatatcgccatccctttcagcctcatgttctagtggcagtttgaatcctaatgttctatctataatctcaatcaatccatttaatgtagtcgcaattcctgtcccaacattgaattgtttacctaaagactcttccttttttgccacaagtaacaatgcttggactacatcttcaatgaacacaaaatctcgagattgcgaaccctccccaaacaatatgaactgcgtatcctcacccttttgaattttcttatagcgatcaactaagattgaaatcactccactataaggagattctggattctgattcggcccatacacattaaagaagcgcaccgcactcgtcttaacaccataaagatgattgtagtccagcacatactgctccgctgcaaatttatcgactgcatatggagtcaatggacgaataaccgactcctcttttttgggaagagtaggctcatctccatataccgcagctgaagagctaaagactaatcgcttcaaacccttttgatattttcttataagttctaacaacatcaaaacactctcaaaattaacttgatgcgtttcaaccggacgttcaacagaatcagccacactcgctatcgcagctagatgaaaaacgtaatcgaaagtattgtttgatagaatatcattcatcaactcactatcagtaacagagccattaataaattggagtttcgaacttttgatcaagttttcttcttttcccatagataaatcgtcaatcacaattactgaattttctttggatagataatttgccaatgtagatccaatgaaacctgcaccaccagtgattaaatatttatatgacataccttctactccttacttaactctcttcatgatccattctctagtgctccgtataacttcattattcgaatatctaaaatagaataaagttattattaaatagagaataacaccaagccctatttttaataaaagcctaacgaatattgataacccagccagcggtaaaatatcaagaacaaccatcattattataccagatataaaaaacacgataaatggacttaaaaacaccttgaaagctatttcttttcgagcagccaaaatttgataaattgcaaggacactttcagatagaaaagttgcgatagtcgcacccagcaatccaaatggtttaactaacaacaagttaacaataatactagtcaaagctccaagcaatacagatatcacgaatggtttatctttagattgtgggatcaaatattgtgttctgataacattgccaagagcgtagaaagggagatatagggctaggccatttaacactaggatacttgcattaaaatctttcccgtagaataatggtacaaaatcttttgaaactcccaatataccaaaggcaaacgctatggaaagaaataaagcaaaaattacagagtaattaaggtatctagttgcttctgctttcgcatccttcttctcataaatagcagacatttgtggcaacattacggtacctaatgcagctattattcctttaggcattgataaaacttgacttccagcattgtaaaagccaacatcttttatactgctcaaatttcctaaaaatactgaggtaaaactagtataaatagttgcagaaacaataggtataaatagaattgccgatggtttaaagtgtttagtcacttctgataacttgatttttttataaaaaatgtagtttttaacttgaaaccaagtgattaaaaatcctgcaatcgcactaccattcatgattagtgtgtacaaccaaagatcatttttatttttaacaagaaggaaaataaaaatcaaagttgataacttaactaaaatatttctaacaataactatattaaattgctgtattccatagaaaaaccaattaatgtctagcatatagctcacaataagaaatacctgcaataaagcaatatcttgatattgtcgagcaaaattaaatacgtaaatcagatacaaaagtatgcaaacaataccactaaataattgtattccgaagatttcgaaaaaaagtatactacgtctttcaacattttctccaactttggcaatagaacgattcccataatgatctacccctagtttaacaactaatgcaaagtaaattgcaattgaataagtataattatagataccaatcttttccgcacctaagatcctagcaatatacggcatcgttaacaaaggaaaaatgattgaaaatacttgataaaatgcattcgagaaaaagtttttggcaatatttttcatgctgatcttcctctcttaaatcttagaccgctttataagaaatttaccaaccgtttcaggctcgtaatgaacatctttataggtcaatttgtgaatattggtcaacttacataaatgcaagaactcttcctctttgtacttttcatttaaacgaaattgtaggaggtgagaatttccattggtttgttgaggtacatttttccactcatttgaaaagcttctagcaaccatgctaaagaaaaggtgaaaaagataatagttgaccaaaacattatggtctttccaatactctaacatcaaccttctagtctcagtgataataggattatttctttttgaagataagaaccaacttgaaattaaaatcggagcatctttattatcattaaaagtcgttctgaatgcaaacaaatccgcgtcaatgatatatttttctaaagggccagtcaagaaaactgtcgcatcaatccagatacccccaaaattagctaatagatccgctcgaacaatatcagaaaactgcgcattagaaataattcctcgcttccatttggtaataatataatcaggtaatttgataaactcattaagatttttttcatttaaaaaaacaatctctcttcctttgcaattctccttaacagaacgcaagcaagcacggactatttctggagattgttcaaatccctgtaaccaacaaacccaaatataattgctagtgttcatttcgtcttttttgtattgtggcttgtattttttatttaaatatttgtatgcattaaatgctcgcctatctgcatccaaagatttagaatatttaaatcttggtcgatacactgttgccccaagatacatcttctcaattagtcttgctaattccattaaatttaaacctacctacataaaaattttaattacctatttcactgataattcgatcgccaagttctttgctagcctcacctgactcaaagaccccataatccttattaaaattttcaattgaagtatagtaaacaaattcgtcaaatttttctatttgacttataagttgattcaggctctttgaaactggaaatggtaaatcatttaaatccaatactaaaccccgatttttcatataactgtcataatcataagcgtataaaaagcatttctttttagaaatcaacatttctccaaaaatagatgaataatccgtaattaatatctctaatgcacagagtaattcttgagtatcagggtaatcattagcatctattatataatcaacacttgttaattcatgaattaaggttgcatgcctcaatatatcattaggatgtagtctcaatagtatgactatctcaaaattaaatttagactcaaagctctgcttcaattttttaagactttctatattaatctcaagactaccatcttctctaaaagtcggagcataaagcaaaatttttttatttttttctattcgataatgcatgtatactttttcaattgttgaagtatcattctttactataatatcgttcttcggtataccatttctgtaaaactctcctgagtaccaaaaagtataatgtaaatttttaaataagtttgaatgttcaaatactaatagatcacacatttgagaatcttttttcgccacacgcacatatcttttgctaaggaattgttcgatatcatgttcaatccgctttagtccaaaccctgcatgccaagtctggagatagaattgatctttacgttttcttgggtgaaagttttttcgacaattatcgatccaaatttttgcagtatgtaattccaacaaagctctaaaggaattattttttactaaacgaatttcatttggaaattcactatgcttattaagtataatatctggtttacaaagccaaactatatctaaattagaataattttttaataaataatcaacaatgtatttgggattctctccgtacgcctttccccaaaaatttgagacaactattttattcttttttacaggaaaaaagaaaagaagtgggtagcataaatagaacaaagaataatcaataattctaagaaaaactactcttactatttttaattttgatctcaaaaaaacacttctttcttaagcaacactatgtctagattttttttcaggaaaataatgatatactaactgacctaacaatagccaaaaaatgaaggctccaattttattaactagaataatctctgaagataaaactgcattaatactgattgctgcaataattagaatattatagaaataaactgttttatataaatttttatctagaaaaacagactttattgctaaaagtgctttacttaaataaaatgagaagaaagtgataaatccaatgattccagttccagcaagtgtatgaacaacaaaactgtgcagagataatcctgtttttgcaacataagtttcaggtaagaaagctttagcataactaacaataccttcacgtgacggaccaacaccaaatagaaaattctgcttaaacatcagaaaaccggctttccaaatgccaaatctcccattagataaatcattagaatctgttacatcatttcttgtcaatttaactggtttttgatttccttggatttccatattattatttccagcttttatttttagactttcaacaaagtcagggataagagttagtccattttttaataaattcaagacaagaaaaacaattccagttatcattgcgttaataaccacactcattaatatgctaagagatacagattttccttttttaagtagatattggttcactaaagtaaagccagcaagaaaaacaattgctaaagtttctattaatcctgttctagagcccgataggagaatgaagcttaaacaaaaaaaacaattaacataaagaaaaacacgtaatatttgattttttatctgcttttggaataaaaacatacaagaaaaaattattgaaatcaaacatacagttgaagcaaagtttggatcagaaaaaacaccaaataatctattttcaagaaacccaagtcttaatggatgaaatctatttggcaatttaacactatgctgcatttgaaaaacaaacatcacgtttgagatagttacaaatacaaaccaaattgtaatcagagtcttagcaaagatttctattgttcgttcggaatgatttctattatgactaaactcatatattacaagtaaataaatcccctcatttaacaagagcttgatattagatccaagaccataatgatagtttaataaactagaaatccccataacaattaaaaatacaaaaagaggaatgttataagaaaacttttttaatctaatcatttgtagcaaatcatacagaatgaagagcgctccgactagaccagcaggtaccaccaaaattgtgttcaaaattttgggtataaagtcatacggtccaaattctttaaaaattaatatcgttccaaaataaagtacataaaaagaacgaaaacgctcaaggtatgaattgatttttgtatctgcaatcatgaaaaaagctcctttttcagtatctcaattgtcttctctaaggattccttaaaattaaatttcggtgtccaaccaagactttttatttttttatcatccaacaatgccacattagctgttgagaaaccttttttttcgatctcatctggcaattcaaatataacctttttactagaataactagcaatactttcagcaaactccctaagggttacatcgctatctagcccctttatgttgtatgcttcgccttttgtgcccttctttattaatgttaatagcgcagaaacaacatcccctacgtagctataagaaaacagttgatctcctttgctttttagaattacatcctgattattggctccattaagaataaactgtgtagaagctttagaatcccttaggtcaaccgtaggcccaaatacgcgacttatcctagcaatgacgatatcaagattatatttggaaatatacgcttgacataaggcttcgctagtccttttagattcgctatatcctgctcttaaagtattgcaatcaatgtatcccatataactttcgtcaaagtatttgacatcttgcctattctccccataaatttcaacactagaaaagaaaattgttctttcaacctttttctctcgcgcaaattctaaaatattttgagtgccaataatattcgtcgttattgtaccaatgggatcggtggcatatgccttagggtgagtattactagccgcttgcaatatgtaatcacatgataaatcactagggagtctcttattgatatcaaattcgattacatcaaaaaaagcatcatcagtataatcaggaaaaagctttaatagcttatttctatttcttccaacacctattatagtgttttgtaatccgtatagcttatttccgtacattaatacatcaataaaaaagcgcccgattaacccggttgcacccaaaatcaaaaaacgtttatttttaatgtttaaactagctaaatcttttgaaacagttagaatatcatccatatatatactattggattgaagcaaaattctttcatcccctaatcattcattttaagataagctttaaatagctctagatcatcagttgtagtcagtttaatatttttatctgatcccgcagcaaaatacagagtttcacctaattctaccatcatagtatttgtgtaagaagaatcggtcataccaattttttcttccaccgctctgttatatgattctagtaatttatcatatttataagcctgtggtgttgatactcttctaatagtatttctatcgatatatgatgtagtagtttcttcagtatccttgataaagatttgttcattgtagggtaaagaagtaaccgcattcccattttcctgacatttaacaattacatcagataatactatttcatctaccaaaggtcgtataccatcgtgtataataattgtgtcatcatcttcagaatagtctttcaaaaactgaacacctttattaatagactcctgaccaatttttccgccttcaataatccattcaatctttttaagtccaaattcctttatatatccttttagagtttcttcccaaccagatttacaaacaactaaaatcctgtctactaatggatggtgttcaaatgattccagagtatatatgatgattggtttattatttatcataatgaattgtttagggatggattgacccattcgtttgcccactccaccagcaatgatcactgcagttatcataatcagttcagctcctattattttcttaaaattttcttatataaaactgagtataagcccgaattagtaagatataagtataaggcgacccttttggcaaaagaaacctctttattacctttgactttttttagtatttctttaatctccacttttgatgtgttgtaatatttttttctgtcaagattatctcttttagaatttcctattttaaaacctgtagataagtacccatctaccaatctagctatggctagatttaaaaattctggaaaatccttttttacatcatttagaagaatttttctttgtatgatattatcatactgtttaggattaaaatcctgataaacaatgctatcaccgttttgaaaatagaaaatccctgcaaaatctagaatatcaatagtatgagcagctttaaaagcatgataaattggtaccatatcttcatacagtttaccttcaggaaattcaatattattaaaaatttcctttttaaaaactttgttccatgcataaaaatcaattgctttacttttaaaaagtaattcaactgcttcagagttactactgcctattttcctactgctgattaactcaattgcatcttcttcagttttccctttcttcaatccaaaacaaacaatctcaggattattatttttaaaatcatctataactttatctatacatcctggtagaaaatagtcatcgctatctaaaaaggctataagttcaccactaattctctttaacccatagtttcttgcagaggataagccgccattatctttatgataacaataaactttatccaacttttttgacaattcatcacaaattaatccgctattgtcagttgagccatcgtcgattaacaatacctctatatttttaaaatcgtttaagaatatactctcaacagctctctctatagtatcttcaacgttgtaaactggaatcactatagaaagtttaatcttaccttcgaagttttctttcatatatttgacctctgattttattgggtaaaaggctcagtacgatatgtgcagaacaagatactaaaaaatctgagatagatcccaacccaacatgatagatagctttccgaccttttagtccatcgataaaatatttttttccaccccgccgagcatacattccctcgcctgttctagcataaacaagcgactcttgaatatttttacctttatacccagcttttaataatcttacccaaaggtaatagtcctcaaatcccatcattggctgataatttccaacatccaaaacagccttctttttaaacataactgtcatatgattaaagggattacgtttttttgaaaattctcgaatctctctattagtttctggaacgattcttctgccaacaatacttttaggtgaatcataaaattcatctatattggagccaactattgttagattaggatccttagtaaattctgagtactgtttttcaattcttgatggaagcatgatatcgtcagtatccattctagcaaccaaatcatatttacaaacctctacaccaatcgctaaagccttacctaatccaacattattatctaaaggaacaacttttaaaacttctaaattgtcttttttaaaatcaatgattacctcttgtaactcagtagtaatcggtccatctaaaatcaaaacaatttcttttgctttaacggtttgtccaagagcacttttcaatgactgcctaaaatattcaggattttcctttatatatacagacatcagtaaactaacatcagcgctttgcaaaaagaacactcctttattcaaaaattttatcttttgggaaattcattttatctaatgatgtacaaatttcatcttcttctaaaccttgagaagatactttatcaaatagaatcttgattgtttgaagtaatattttcaaatctaacatgaaagaatacttcttaatatacaacaaatcaaattttaacttactattatagtcggatgcatatttcccataaacttgggcataacctgtaattccagcacgaacattatgtctcaagtaatagtatggattttcatcattaaactgctcaacaaagaacggtcgttcaggacgaggcccaataatagacatgtcaccttttaatacattaattagttgaggtaactcatcaaagcgaacagcacgtataaacttacccactggtgtcacacgagcatcgttactttttgctaaaacgggacccgatttagattctgcagtggcactcattgaacggaatttataaatcggaaattctttctgatcttgtgtaattcgaatctgcttatatatgatcggtcctggtgaggttacttttactagtactgcagttatcaacataaaaggagaggaaataactaataggatcaaagaaacaacaatatcaaaaagacgtttaaacatcgcatcttcagaaggaattctaaaacctgatgattcaattatgctttcatcttcaaaattcataatgttaggattgatcgttacgagattctcaaatgttgtatttagaaatagcttcttctcttcctttgtaacaagttgatagaccttaattttttcagcctcgtcaatctcagaggctaaataaacaatatctacatcatcaataattcctctcaaattttcatagaaatggtctaacacaactgattgaaccttatgtttattatttttttgtgagctgaagttttgaatcgcaggagcgacatcttgttcaaatccgagaatagtgacaattttatctgagctcagtttcatatatgctttataaatgattgtacgataaataattagtagtatagttcccatcaagaatgaaattaagataacagttctaggaaaagcaaaccaacgtccagcgaaggtaatgatcataattcctagcgacatcaaaaattgaccaataaccgtcacaaagataatatcgctaacgattcgattataaaaaacatagcttcctagtagtacatttaataaaataaagaaaatcgaaataaataatgcggaactttcaaacgtttgaaagtttctttctggaatggttccattaaatttcagccaaaaactaaaatagatggaaaaattgtaaacaactacatccatcatgataataaaaaatcgacgggcagcgctccattcaccatttttattcatacaaacactcctaatccacaaaataatccattacacatcttaccatacacgttcaaaaaaaagtagcgttcatatgaaaagtaataaaaaagcaaagaacaaaaagcggtcaaattcaccaatttgatcgcctgacctaaagtgataaaattattcacttctccttttataaaacaagaatttgtatgacaattcaacaattgttagggtttgttgacgaagtattctttaaagtttaatatgttataagactacattcagaaaatctgtaatgattatagattgttagtctttgtacggggctctaaataaatgattttcttttttttcaattgtatttcttatagaggaagcgatgaaatacattaaatacgtcaacaaagctgtagccataataactgaacatacgtatagtaaccgatttcctataaaaaatattttgctacgaagcaatggaataaatagcccttgatataaatacaactcaaaagagaagggttttagcaaatgaaagatcgggcttttgaaggttactttatagctacaaattataattaatacaacaaagaaaagaacagaaagtgaccgtataattggatgataaaaaacttcatcaatataaaaaaataaactaaatagtactgctacagccccgattgttactcgataacgtttaaatagaaagttggtcatttctccttcttttgctccccacacaacccctaaggggaaacaaaaaactgcattagtccaccattctccataacttagtagattcgaaatcaaggttattactataacacaagtaataagtatcaaaaatagaagtaaatcgttctctttacttaaagatgcactaacaaaaaaaacaacatacaaatatataatcatcatagtaaaccaaccatttccaacgaatgggttcccattcactaatgagtacattgccgcagaaaagtttagttcaccaatcagattgcgatatacaaaataaacaatcatcgctagtaaaaaaggtaagaggatactcatgccttttttcttaaaaaaagtgtctaaataagatttacctttctgtttaaattgtttgattagtccataccctgagacaaagaaaaatagtcctactgctagtctgccagcaattatcaatctagatgataaaaaagaatcaggatagtctcgaagaatctgcgataaatgatgtaaaatcacaaataatacagcaattatctgtagattggtcgttgtttcaacagataaactttgattagaataatctgaattagtatcaatacttgaaataataaaaaaaactattattaaaaataataaaatccaactgtcatccatctcaaatcataatatctatattgtatcaaaaagtatacaggaaaaggtaacgaattttgtaaacaagccatataggttaatcgaagtcacccaggtatgacttttcaacgctttgacgtatccggtggtgaggtcgagtccaaccatggtcaaaaaaacgcccatgatcggcagacttccgccgaatagataattgattaagggaatttgtatcatatagattcctcgctttctaaattaattgatagcccctgcgaatttctttttgcaggggctaatagctgttgatccctacgcagtatgtggttgtcaatgaacggatttaattgggaaaaggcctatttccgtggtgtctcaggcggcccttccttgtttttcttcctgatccgatgaagccattgaagcagtctgttttgttcttttgtgtctttatttgatgaatcttcaatcaaaggcataacagtgggttgctgatcgttagtttcgctatatctggattgcagaagcgactccttttctactttaatcgctgctttttccgaaggttcaatcgtagttaattgtttaaagtagcgaccatgtggtgttgctgggagcacggaggatttcggagtcggcaaagcgatcttttcttccgcgacctcaaagcaacgaacttcttcacaggtcggttcttcgacagcgggctctccatcgtaacgaacacctctcgtctcatgttctggatcaaatatcagggtttctttatgggtcaaaattttagcggtgaccacagaatcaaatagttttacgccgttttgtgtacaaatgtctaagttcgtcaatagttcgcaagcttctttgatctgtggcgccgtcaaattgggatcaaggtctttatatttccaattgtgggtgccgccatcgctttttccaaaggtggcaattaaatccttggtcattgttcatttcctttctttgattttttctgcgtaggttggttcatggttttatcaaggttcgccggtttcttctggtcggacgattgacataagggagcgggcaacagaaacgactttttcaccgaatttttttactggaaagaccctcaatttcaaagtcttccattccggtgccataaagtagtcttcaaaataataaaagagacgtttcatagtgcgggtagctttggtatgcatgaacacttcgcggacaagatcctttagaaagtgatcaaactccgccgctcctaattggcagcgaacttttaaggctaaaatgtatttgatggtgacactactgttttgtgtttcatgataaaaattggtgattcgttgttcgagtgttttagcttttaagttgaataactgccgaaacgacagtgtttgtaagacattcattgattctcatcctttcattcgtagaggagggcggcgatagcgccgctgctcctcaaagtatttggttaaaaaataattgtttcaatcgtttcgacgtacttggcggtttcgactgtgtgaaaaagttctgcgccatctttctgacaaagctttacctctgtcatgcgttgtaacaatcctttgatctctgtatcggtcttttgagtatcgggatcattgaagctccaggtgtggttcttccctaagctgtttttaaaggttgcgacgagttttagcatttttttcttcctttgactgatagcgatttcataatttctcccagttcaaggaccttctcttcgctaggctcatccatcacattcgtaaaggtgatcttcttagttttttctccgcctgcatcgatttctacttgtagtttattgtcgatagtttgaatcatccttttttcctcctaaattttttggttccggccggtgactaaaagataaacgatttctaaaaaaagtgcgaatcgcaaattgaccaaaaggggggcaatttgacctgtttttgggtaaaaagtgctgtttttgatgaaaaagtggtcaaattgggggtgaaatggtcaatttgcgattttacaagcaggatcgaaatatagtataataaaatttttataaatgacgtttacataaatgtgaaaaatttaagatgactgaatttccctgtagaataaattgtttttaactgaatcatttcccataggatgaaccgtcctatttaaaaacatgatagttaaaataagccatattagagataaccatacttccattttacaaacattaagtagtttcacttagaataaaatttcctaatttgtgatgataaataaatagatacacatcaacaaaatgtcagctgtgagaatagtcaaaatctttaaatattactctctctccctcttattagttttactaaataagaaaaattattactgctaattttccagtaatatgcacggatggagataagaaagagccggataatccctaaaacttttggtaaatgatctgctactacaaacacaaccataagtactagtaatttttatagatagctactggttaatataatcttgtttttaatagtactaattaaagagcgatacaaatcggccaaaagactgatataacaatcttttggccgatttgtatcgctctatttaattttagaatcatctgattttgcttaatcgtttgaaactatttcactttcctattcgcaccgaaaaatctccaccacttctcgtcaaattcggattataatacggatcattttcaatatagcttgtccaagtgtcttccatatacttggtttccttttcaaaccgagcttgcttttcgggtgtgttttcgtatcctcgggattgagattcgaagtggtataattcgactccatgtagccacacattgttgtgacctttctcatattctcgcaaacacagatcaacatcgttaaaagcaacagtcaactcttcgtcaaagcccttcaactcagcaaaatctttagctcgaatcattaagcatgctgcagtaactgctaaataatcaacgttgatctctaattttccaaaataaccaaaatctcctcgtgggaaagtatgatgaccatgcccagcggcaccacccattcctagtattacaccagcatgctgaatcgtattgtttggatagtataattttgcaccaacacaaccaatacgctcaaactgtgtaaaagaaaccattttagtcatccattctggcgtgattacttctgtgtcattatttaggaatagcagatactttcctttagcaacttttgcagctaaattattgatgcgagaataattgaatggaatatcgatcgactctacaatgaaacgatcatccaattgcttcttgtacccagcataaagctcctgcatctctggctgatcacttccgttatcagccagaatgatctcataatttgaataagtcgttttttcaataatagaatctacgcaacgcttcacgtcatcatacccattacgtgtaggtatgatcacactgactaagtcctcagataatactttgtaatctacatcatataatccatttccagccgcatgctgaactgtcgcctcgatcccgcgtcgattgattgcatcctgaacagcttttaagcccgcatcaaaagcatagcttttcgttgattgatcggctgctgttgagcttggtaggatacgccagtaatagagtatctgtggaatgtgtgcaattcgctcagcagttgtttgttctgtaaaacgcagaactaggtcataatcttgcgatccttcatagccaacacgaaatcctccgattttttccatgattgaacgacgataaacacctaaatgagaaatataattcgtacctagtaataaatcaggcgaccaatctggcttaaaggctgggtcaaaacgtttgcctgtcatatcaatcttatcttcatcactatatatcaaatctaaattcgcattttcgtttaagcgcttggtaacttcgtacaaagcaattggtgcaagttcatcgtcattatctagtaaagcaacaaactcaccagtcgcaatctctaacgcagaatttgttgctttagaaatatgaccgttttcagaacggaaaacatttttgatccgagaatcctgagccgcatatttttctaataacggtcttacggattcatccgtggaatgatcatctgccatacacaattcccagttaggataaaactgattctgaacggactcaatacatttctccagccatttttcttcaacgttataaaccggcatcaaaattgaaataactggttgataatcaaatgcggcgatttcagctttgattgcctcagcatcccaattttcattttcaacgatccactgctgataactttcatcggattgcttattttgttccaatttgattcgacgcaaagtattctttaagccgttgcgtttcaaataacccaagcctttacgtgctttgccataaaaattctgaatttgtgatggttgttttgatacttttacaatgttttctctcggaataaaagattcattttgtgcatgatcactaaaatgaaaatcaagcgatattttttcatctggattttctaccttaatagttatctcaaaacccatttgcagattagcacttgttttatgtgcggctgccacatctgaacgtgggtaccactcgattttatcgctagtgacattttccgaatgaacagtgattgtaggcacatctttagtaactagatcaagagcccatcctttgatttctaattgattcgtctctagttggaacttgcattgatcaatgcaaacttgttcattttttgccatcggattagcctcctatgctgaattgatttggattgaccaatggatcattcaattcttgagaatatttattacttaaaatatcataagcttcttttttcacactaaaatgattttcaccaggatagcgtacttcaaaatagggatcaaaaatcagtttctttttttctcttgccaatcgaatcgaaatgtcaatacctttaatagctactggcaatgattgatcgaatccgtctaatgctacaaatatatctttttgaataatcaatgcatcttctgtagctgtgtagatttcccgtggcagagccggacgaaaatacgtcccaatcgtcttgtttgatagtccctgctgttcgtacactattccttcatgggtagaatcaatcgtcacaccgcagtaaaggattgcctcgtctttactaataatcttcccagtgactgctcccacattaggcaagcgtaaaaaatttgttgcttcttttaaccaagtagattttgtcgggaccaatttttcagacaagaacactaaaaaatcaccctcggctgcttcggcaagttcattttcatttttgccagtaaatatccgaacacgttcatcggctacatcagaatgattagtcaaaatttcaaaatcagaccactcggtgattaaaagttgttctaattgttcttcactcgttttcccactcaaaataatcgaaacttttggttctgtatgataattaaagtcgatcttataagcaccataattttttgtcatggttacaacaccgtttagattgcgacggtcgagcgctgcttgtaacgcattctgacctgctacataagcgtattctttgctttgaggatccatcgccactgatgtttctatcgttcgccaatggtaaagaatattcggtatatgataaatttcttttgctgcttctgttgcacgtagcacaaagtcataatcctgactgccattaaattccgttcgtaaaccaccgattgcttctatgattgaacgcttcacaactacaaaatgtgtaatataattgtgtccaagtaataacgtttcattccagttcggtttaaaaaatggatcaaaacgtttgccactcattgagagcttatcttcatccgtgtaaataaattcacggttttgatcttcatttaaggcactaacaactgctagaagtgctgtatctgctagaatatcgtcattatctaaaaagccaatatactctccagttgccacctcaatcgctgagttggtagcttcggaaatatgtccattcttttcacgaagaacaacttttatgcgttcgtcttctgctgctaattcctgtaacaaaggcttgatgtgagcctttggtgaagcatcatctgctaaacaaagttcccaattggaataaagttgattcttcaaagaatccacacaagctcgcagccatttttcatcaacgttatacactggtacaaccaaagaaattttaggctgaaaagctaatcctcttgatgcttcgattagttgtgaacgatacggttcttcaacctttgtcatccattcttcataattcgcactttgttgtttagagcgttgataattctttatcgctccagcaaagccatttcgtttgattgatccaagcaaacggcgaatttttcttgccgtagttgtattcgcagtctctatccttcgtgctacaactggataaatttgatcttgatcgtctattagaagcagcttcacaccgtccgttatttgcaaatctttaatcgttagaataaagccaaacttatctgcggatgctattccaaatacttcattgacatctgggcgatagatacgattaacattcatttgtttcaccgattctgccattaaaaaatctaatggcgccttcgtagcttctgaaaatccccacccttttataatggcttcattttcagattcattattttcaatcgtctcaatcgttaatttgattccttctatttcaattcctggttctagctctaaaaaaggaatattcttcaactgatagccatacttatctagatagttcagtttcaaagaaagtaaacgatttaatcccttttcgtatctgaggtcatccatcattttttcttctgctgggaagaattcttcttcatttaaaacatttacatttactgaatattcttttccggctattgctgctccatcaacaaccacataaggctcttctgcaatctcagggaacataaaaagatcttcttggtaccaagaagcatttgtttcttcaattttcaggagcctattttccacaataacagatagttgaattgaagcaggaactttaccgataacaattcttaatttcttagtatcctcaggtgcgtgatgaacggtacttttattttcgccggtttgattattaaatatatacggctctacttcaaatttaccattaataagataagctaattgtatttgcttattgtaatttgaattaattggttcgacacgctctggattcgtaacaggttctttgcgcaatgcataaaaatattgataaacttcgccaaagggacgatttttgaaatcataacgaaccatctcaggcaagtcttcgtaactcgcagacagttcattttgtccaacctgtgcgtaagtaaagtcttctcgacgtattgacaaaccaattcgatcaaataactcttcgaatcctttttgcgtataaaaactgttatgtgtgcgatccagtaaaccgtattgtttccagtccaatttattattaaacaaatcaatcagtactgaattatgcgccaaattcgggaatgttaatagtatctctccattttgagccaaaaatttactggccttctccagcgctttttccgaatcagtcaaatgctctaaaacatctgcaaaaataataaaatcgaagcttttaccagaaaaatgatcacaccatttatattcttcaatgtttcctaaaaagccgtcttgggcaaagcccatgacgtgctcaaataagatcggatcaaactcaacaattgatacttcacattttttttcattgattagatacttagtcattcgaccattacctggaccaaattctaaaacagatgaactttcagggatctggctaataatcttcccaacactcgtatgttcttcaagcgacaaatcaaaatcatacttcattttaaatcgtatccttccacttatgatccaagacaacgatgccttcaccaacatatttaccagaaataaacatggttaaataccttgttttataaaccaatggcacggtcgcgttttcttcaaaaagggctacatcaaaataatattcgccgcctaaaagtgccatcttttcgtattctaaatagaagacattctctccctttttccaaggaattgattcttcatccaataatgtattcaacccgcacacgtaattattatctacagttcggatagccacacctaaaacaggtttctttatagaatcgtccttcacattatatactacctttataactaccttactatcttgttcaacgatttctaaaggttgcagatttccatctaataattcagctgatttcacttccacgatatcataagcagaaaaatcttcagatgaagagttttcacgatcaactgtttttaaagatttctttttcaaaaagttttcatatgtttcagtgatttccatcgtctcgccttcagcttctacgacaccgtttttcagccaatacactcgatcacaaaaacggcgaactgcgtttacatcatgcgaaacaaaaagaattgtttttccagcatttcgtagctcagtgaatttttccatacattttaattgaaattctaagtcaccgacggctaaggcttcatccacgatcaaaatatctggatcgacattgattgccactgcaaaagcaaggcggacgaacattccactcgaatatgttttaacaggttgatacaagtgatccccaatatcagcgaaattgatgatgtcatccaccttttcagccatctcttcacgagaataacctaataccatcccattaagaaaaatgttttcataaccgctgtattctggattaaagcctgaacccagctccaaaagcgctgcaatatttccctcaatctttacttcaccttcagaaggtgttagtacacccgtaatgatttttaaaatcgtcgattttcccgaaccattttcaccaataaaaccaatcatctcgcctttttctactttaacattcacatcatttaaagcataaaaaacttcatggtatgtttttcttgttggactcaaggcttccttcagacgatcagatggctttttgtacatatcatattttttagttaaatggtttatctcaattacagtttcagtcattttttcagtcatttagatttatctccttataaaacatcagaaaaatgtggttttaagcgtttgaagacgatactgccgattactagtaaaatcaaagtaacagcccagaaatagattgataacatcggcttttcccagaaccactgctcaccaaaaaatgcgtcccgatagccttggacaacataaaacatgggattgaatttcaaaataaactgaatcgttgggtgcgccgcaaattgattgatgctccacaatactggcgtcccccacattagcgcttgcataataacaccaataaattggttaatatctgggaaaaaaggctggattgatgacgtaatccaagtcaatcctgttaaaaacatcatcatcgcaaaaagatagtagaacatctgcaaaatatgcaaatctggtaccacctgattaaagagtcctacaacaagtgcaataataatgaaaaatacatgcatatacatagcagaaaataatttaacagatggtaaaattcgaatgttaaaaacaacttttttcactaaatagctgtattcacgaaaaacatttgtagctgaacctaatacctctgaaaaatacatccatggtactaaaccagtcaatagaaaaacaataaatggatatttaccatctgtcatggctgctttgaatccaacaccgaacacaaaccagtaggtcactaccatcactaatggattcgcaaaagcccaaaaaattcctaaagctgacccggcatagcgggccttgaaatcatttatagagaattgctttagtaatgtacgattctggataatctctttaaaaaaaccaagtaagtctttgaacattttctttcctctcatctaacgatttatttattacttctatagttgattaacgttattattctacagaaagatatatgtaaaagcaaggttattaagaaaagcttcgctatttcagtcaagctttcaatctcttaattttggcttgttcatattaacatatagtcaaatttcgcgtagacctaaaccacgaattatcagataaaaaaaactaatgctgttaaacttaaagagctaaaattctattaaattttataaaacatttatacttaccctatgttgaactaaattttgatttattaatgaatatagctattttacttagaaaaaccttttttattaaatagaagatgaaatcttcaaaacgtactgtaaatttggcactgaaacaaaaaaagtttagatgtctgacacaacatctaaactttattcattataatctcctgcgatttttccgcgagggctctatttcaagttcttcatctctctgatcgaatacatttgttgaatagtcatagatttcttcaatctcagggttttcttgccaagcaagacctaacaaacagaaagtgattggaatccaataaggtgccattagagtatcttccatcgttgattgcaacaaaatagcaaaaaaagcgataatgaaactaaattgaatagcttgagtttcctccctaataataagcgaccaaatattatatagtatgaatagactgatgaggacaagtccaattaatccaaatccgcctaatatcgcattatagctgttatggtttcctaagacttgctccccacgcttaaaggtgaacggcggcatccccaccaagaattgttttcgaactttaaacagcgtatcataaaattgtttccaaatatcttcgcgcccagtaaacaaatcaatattactcgaatttgccaaataaagtgataatggaaaaatacctataagaaaaacactgtacacgacgccataagcccatctaacttttcccttcaaaaaattaggccatgcgtcaaaaagaacgaagcagacaacagcaaaaaatgctgcttgggattgaacgacccacgtacatgctaatgcgataaaataaactacaaacttaagtatttttgcccatgtccaatccagtgattgcaacaaagtggcgatcagaaagcttgaacacatcacactgctaccaatcgtgtttgtattaatccaaatctcctgaagcttattgctcttatcccaaatactattaccagatgtcggtgttggaatctctgaaaaaattcggtatgccgtgattaaaagaattatcaacatcaatccagcaaatatcaaccgtagttccttcgtaaattcaactaatttaaaatccaaaacaacgaaaataatcaaagcaatcgttatgtccaagaaaaaatcagcctgtctcatggtatcaaattgatgaaagaaaagaattgaaagcagtgcaactccaacccaaatcatatcagcccatttcatccgataacaattcagcactaaaacaatcgtagcaccaatcggcatgtaacgactcatatgtgcataaatgttaaacatttcaggcgtgccgattcctctagtccaaaggaaaaagcataatagtgtcattccgattagaatagatgcactaactaagttcaaaatagctgctgtgccttcttttactcgtcccatttttctctccgactttctcttaattaatatactcaccatagcttggcgccggctgtggaatttcctgatagttctccgttccgccaactggatcaatctcatcttcaggttgtacctgttcttcatctgaagtaaagctcaacttataaattgaccacttgtctttatccggaccataaatgcgttcaaattgtgcatagtttaatgagttatagtcctccatcggacgtttactaattacatatttaaatcctagttttttacaatctgtaaaattgagataaaccgtaaaattatcaggtcgatccaagtggaatcttgttgcttccgatacagcaaacgcacgtgtatgcgcataacggttgtagattttctcattcttaccttttggatcaatctcatgccataacttcatatctggataaaaacgtacagaattaatcgtcttcacacctaatgctggagtaaaattatacaaatccccctctgaaagccataatgcatcggggtctttctttttaattttaacgatttcttcggccaatgtcttcttatcaatcgctccagttccacgtacgactggattaacaaaaattcctgagactaaaacaatcacagtcatccccaagataaacacttttttcaatttgaatagcacgcagaaaagaagtaaagcgaacaccacaagtgtcataaaaatttcaaaattattaaaatacaaccccattactgaggaaatgacagaatgagaagcctgtatcataacaagaccaaatattattaattttatccaccaagaaacttttacatgttcccataagaaatttatcatccataaacttaataataccgagccaaaacctaaagttactaaaccacgtgtacttgtcacataagtcaacatcaaagtttttgcgatgccatgactatagccgaaataggtccaaccaaaaacgaaacaacaaaacaaccctaaaattactcccaaatatttttcttccttgcctcgtttagaaaagaaaacaaatggtgatagcaatactgtcagaggaaataaattgaaatatgatgcgacttccccgttgtttgtcccataaaaatcgaagtcttcaaatgggattttccaatttgtcaaaaacagaaaataatctgataatggacggcccccgccttcagcttcacgatggcctggataaatagtgttcatcgtcgcatcgatagcatcctttgatgtattataaaaatgtaaaagaataaatacgattagtccaagaccaccaataataatcggtaaatcccaaatatctagtactattttttttcggaaatgaatcaatgtgccgaacaaccaaaatagaattagatacgccaatggcacttggtgggcaggatacaatactaagacaaaaccgatgccattaatcacaattaagctcatcataagtagacgcaagattttgttgtcgtgcttagcaataaaataataacttgctaccataatcgccaacgtaaaaaatattaaatctcctacatgctgcataaaccaccattgaattgagggagaaaaagtgatccagaatgcccccaacaatgacaagtacttattacgtttggttaggatcatgaccaattcgaaactcaatagaagcatcccgataattttaaatccccaataaaaggagagtcctcgttctttccccaaaaaaagaaatccccaattgaatggttttcctatcacagttatatccttaacaggcgagttgtaagcaagaatcatgttttggccttctttgccatactgcttgtttacgactggataatcactttcagcttgtgagaaataaaaaggcgtttgaaccatccattcatccgaacgaacagctctattttcaccaaaaatgacatcagacttcttgtcgtcactacgttcagaaacaattttatcccaagaacctatcgaactcccatttaagtttagtacgacgattaaaataagaaaaagtatgcctattatgtatctaaagcgaatgatttgatcaataatccattcaaaaggattcgtcttctcatatggcacttccctagtccgcttttctgcccgtgtttccattttttcctcctgaaattaaaaattcgaatgtcaattttccatagttaaatcttcctgttaaaatctgtttacatcctcgaagtaataactgccttcgatattgaggaagcaattgtttgttatataaataataatagcatttttcagcttgaatgattgctagataacgagaaagattcatatgatttttatagtctaacactgataattgatgttctagtttatttgaaagaatatagatttgttgatgttcgttaaagatacgccagcaaagccaatgatccaagtagtctaatggaaaatgaatattgtacccgcccaattctcgtaaaaaaatcgttcttattgccgttcctgaattaatcaccataatatccttagaatatacacgattttttttaggtaattctgtatgtaatggacgcaaagtatcgctacgtacaggagaaatttgtcgttcattgtctgttactatcggagccacggctgcgacagtttctgacaattctgaagatgtactaattagttcacttaagtattctttcgttagctttgtatcttgatctaaggtcatcagccattctgtgtcatcattgctttggtccaaagcgtaattataagcctgagccaatccaacattttttttactgtgataataaatgaaacgcccttctaattctactggttctgtcccctgctcactgttatcaaaaatcaaaatttttcgaatttctggaaaagctccagaggcaagaagttggtttaagcttatgatcgtcggcgactcagaaaacgtcatattataaagaaccaccactacttcaaacaaatctctcacctctagcttctttcttattgttttgcttctaattcaaggaaactattcaatgcttcttgccacgtaggtatttcaaaacctaatcctttggctttacttaagtccatgattgaatattgcggacgagtggctttttgcggatactcctcagaagtcaccggtgctacttctacatctgtatctttcaaaatttcttttgcgaactcataccatgaacagctgttttcattcgataaatgataaatgccgaatggtgctttcttttcaatgacgaataccataaattctgctaatgtccgtgtccaagttggtcggccgaattgatcatttacaaccgtcaaacgatcatgcgttttagctaatttctgcatggtataaataaagttatgaccatagatgccaaatacccatgaagtacggatgatataatagtcatccatcgtttcttgtacagctttttcgcccaatagtttcgttcggccatattcgcttaatgggtttgtcgtatcgtctacttgatacataccttcttttttcttaccatcaaagacgtaatccgtactaatataaattaatgttgctccggcagcttttgctgcttcagcaacgttccgtgtgccttccacgttgattttttcatctaactcttttccttcgtcctccgccttatcaacagcagtgtaagcagcacaatgatagataatttctggtttcatatctgtaatgaacttgtacgtaccctctttatcggtaatatcaagctgatcagcatctgttgaaagatactcaagctttttttcatctaataaatgacgtaactctgttcctaattgtccgtgtccacctgtaattaagatcatttctatcgactccttttctcaaaaaaaggcaggttacccctgccagattcaattagtattattggccgtttttggcgtaattactttcgaccgcttctttttcagcacgccaccactcttcatgctcagtataccatttaatggtgtctttcatacccgcacggaagttcgtaaattctggtgtccaccctaattcttctcgtaatttcgttgaatcgattgcataacgtaaatcatgcccagcacgatcctttacatgatcgtatgcgtcttttggttgacccatttcttctaagatgatctccattacggttttattatcttcttctccatccgcaccaatcagataggtttcaccaatcttacccttggttaagattgcccaaacagcagaagaatgatcattagtgtgtatccaatctcgcacattcttaccgtcaccgtacaattttggacgaattccgctcaaaatgtttgtaatttgacggggaatgaatttttcaatatgttgatacggaccatagttatttgaacaatttgaaattgtcgcccgtaatccaaacgaccgtacccaagcttttactaataaatctgatcctgctttggttgacgaatatggacttgaaggattgtaaggtgtttctgctgtgaatttttctccttcaccttcaccatggccgggcaaatcttctcttaatggaagatcgccatatacttcatcggtggatacatgatgataccgcacattattttttcgacatgcttcaatcaatgtataggttccaatgatgttcgtttgaacaaaaggaaatggatcttttagagaattgtcattgtgagattcggccgcataatgaacaaccgcatctgtttttttgactaaacgatcaactaactctgcatcagcaatatcgccaactactaattctactcgatcttcaggtaatccagctaaattttccttgtttcctgcgtaagttaatttatctaaaacagtaatgtggacatctggatgattatttgcaacataatgaacaaagttagagccgatgaaacctgctccaccagttacgataatatttttcatcaattatctaccccttaaatttcaccataaacgaaaggattttcagcttcaaattctttcaaggttggttgttttgcatctttttctgatgtgatggctttttcgatatcaatcggccaatcaatcgctaaatctggatctgcaaatgaaataccaccatctgcctctgcatcgtaataattatcacacttgtacatgaaattgacatttggggtcaatgtaacaaatccgtgagcatatcctcgaggaactaacaattgacgatgattatgctcagaaagaatataaccttcccatttcccataagttggacttcctttacggatatccacgatgacatcgagaactgctcccgtcacaacgcgaatcaatttcgtttgggctgattttcccttttgaaagtgcaagcctcgcagcacacctggttgtgttgaaagtgaatgattgtcttgaataaaatcaaaatctattccagctgctttgaagtcttctactgaaaaactctcagtgaaaaagccgcggtgatcgccaaaaactgctggttcaataatttttacatctgttaaatttgtttctgttaccttaattttccccatgcttattcctcttctgctaaacgtaataggtattgtccatactgatttttctttaatggttgggcaagttcgatcaatcgctcttttgtgatatagcccattcgataggaaatctcctctaaacaagccaccttcaaattttgacgcttctcaatcgttgaaataaatgttgacgcttctaataatgattcgtgagtaccagtatctaaccacgcaaacccgcgactcattacttctacagataatttattgcgtactaaatattctttgtttacatcagtgatttctaactctccacgctcagaaggttcaatattcttggcaatttccactacatcgttatcatagaaatacaaaccagttactgcatagtgagattttggtttttcaggtttttcttcgattgacacggcttgcatctcattgtcaaactccaccacgccaaagcgttccggatcatttacatggtaaccaaaaactgttgcaccttcagtcttcttagctgctcgctgcagcatgcgggacaatccatcaccataataaatattgtctcccagaactaaacaaacactatcatcgccaataaattcttcaccaataataaaagcctgtgccaagccatccggactttcctgaacagcgtactcaatgtggatgcctaattcatttccatctccaaaaagattttcaaaccttggtgtatcttgtggtgttgagataattaaaatctcattgatcccagccagcatcaatgttgacattgggtagtaaatcattggtttatcataaaccggcattaattgtttcgaggttgctttagttagagggtataaacgagttccgctaccccctgctaagataattcctttcataattacgctcctttttaatacatacgaacatattatacctgatgttagttattagaagaatcgttttgctatttttttttgatttcttttattctttttcttaccaattgcaacgcattccagcgccacttaaattgttggatgcgcgaagcagtggtcttgatttccgaagcgttcaaaccatgacgacgataatagaccaattgatcaggaataaagacaactcctcgataataatcagctaataagccaatccacatatcgtgcatcggaacttcttgcggaatcggtaagataatctcttttaatcccgatcgaaatgccataccggcaccaatataactgcttttcacgagattatgccaaaaaccagaatgcgtatggcgcatcgcttgataagaaggaaccaaaacttcaaaattattgtccacaataaccaaatcagaaatgacagcctgtgtttgaggattatcaaaataaggcattgttttttttaccttatccggaagccaaacatcatcctgatcactcaaaaaaataattgaatgcgcacttttttcaattgcatttgcaaaattagcaatcaaaccttgtccattatttcgaaaaagcttgatccgtgaatcttttgcttccaactctaataaaaattcccacgttccatctgttgaatggtcgtcggaaataatcaactcatcatgctccgagagctgtgggaatatgctattcaattgttcttcaataaagtgacggccgttgtacgttgccatacaaacagatatccgcttctcggattgctttagcatcccctacctccaaatttaaaagaattgccagccccatttttgaaagtattttctcatggactgtaaaaaaatgaaaaataagtgttgatttttaactgctccacgctcatataaatgaataactgaaaattgaggactgtataacgccttgtagccagcttgctccattttacgacaaagatcattgtcctcaaaatacataaagtagcgatcgtcaaatccattgatttcattgaacttgactagatccaccaccataaagctgccagaaatcattcgtacaaaactatcttgatcatccggtaaatcacgacattcaaattttgctaaccgttttgcaaacagccttttaacaaacttaaacggaataaaccgaagcatataatcaaagacatctaaatgattacgtattaggtattgtgttgttccatcctcattcaagattttgggagccaaaagtccacatttgggatgatcagctaaatgcttaaccatttcatttaaatgattttctgacaatataatatcggggttaaaaataattccataaccagaaacacctaagagattcgcgttatgtccgaagccaaaccctttattttcttcaaagaactcaatcgatacaaatgaatactcaaggtattttgctaaacgttcttggtatttcacttcagacgcattatcaaaaatcttaatttgaattgattgatctttacctagcgatctgattaatgaatctagacttaaaaaaatcttgtcgctgttatgagtcacgatgctaacagtcacattcatatcatttactttcataagggacgtcaacactcatttcttgaaatatttgcgcaatacctgcgaacggtactctttgttcccaaagaaacgaaaactttttgtaataattccatatttttccggaatcaacccaatcaactctaacaggaaagtcaaagcaaaaaccattgcaataatcaaaacaatcgttcccaccctgctcgtatagtttaataataatgcagtaaaagaaaataatacggcaatggcgtaaatcgttaatacagctccacgatgagtaaatcccaaattcaataagcgatgatgtaaatgctgcttgtcggccattgagattggcatgttgcttgttttacgacgtatcatggcaaaaaaggtatctgtcactggaacacccagaataattaagggagtaatcaaagagataaaggtaacattttttaagccttgtaaagttaatacagaaatcataaaacctaaaaacagagctccagtatcgcctagataaatcttggccggatgaaaattatatgggaaaaaacctaatatacttgcaactaaacaaaaaatagctaaagatataaacacctgtgatgaatgcaaaaagaaataccctattataccgattgtcatcaaactaatgattgatacacctgaagcaagtccgtccaatccatcgatcaaattcaatgcattcgtaataccaaaaatccaaaacaatgtagctggcaaactcagccactctaagttaattcgaccgaataatggagcggtaaagaagtcaaagcgaataccagcgtaataatagatcactagaccagccagtaaaatacctatacttttttgttttggagaaagttcgaacttatcatctagcaagcctgtgattacgataattaaagcacctaacaaaattttactaatataatcaaaaggaatcgcatcacgaaataaaaatagtgaagaaatagcaaaagtaataaaaatcggcaagccaccagcacttggcattggcacttgattcattcggcgcgcattaggattgtcgaccaaaccagtttgtaccgaaattattttaaaaatcggagtcaaaattaatgcgatcaaaaatgttaaaaagtacttaatgatcaatccgaatgatactaacatgttgacacctgcctttttactaaaaattattataaaggattcaaccacctttacaaggttctcatgaaatcttacaaaaaatcttgaaattattttttctttttaatgaagcgatccttcaatttattcaaccatttattcaaacgattagatccttccttaacctcttgtcctgtacgatattcctcgatagtcacatttaatactccgcctaaaataataatggtagcggcaaaattcaaccaaaacattaaaacaataaaacttccaatgatttgatatcctgacacacgttgagcgaaagtacgtgcgtaaatactgaagccttgagctagaactatccagcccaccgtagcaaaaacggttcctggcaatgcatattttatccgtacatgtgcattgggaatgacaatatacagacctccaaggataaccaacaagccaatcaatgttacaggccaacgtaacgctaagaaagtattgataatatccggtgagaaacgcaacaattgctgcaaagcatccaagatcacttgtcctgcactgaaaaaaagtgcgacagcaatgattgccatcattagtacaccaacaattccaaccgacacaatacggctaataacgaaatttccacgatcttcaacaccgtacgcacgattaagtgcggtttgcaaagcattaatcccacgacttgatgaccataatgccgctaaaacggaaatggaaagcattccacctgaactgctttctaacaagcttgtaatggctggcttcaaaaaactgaagacatttggaggaatggcctcgctcaaataaggcaaaactgtttcaggagtaatgttaaagtacggcagcaaattaccaacaataatcaagatagggaaaaaggatagcaacaaataataggcaactaccactgagcggtcgcctatttctgtctctgctaaatgtttttggattgattggatgaaatccattaatttcttgttatttttaattttatctattggccccatagcatcctcgtcgttctaataagttccttcttcaccttgtgaagtcaagatttttggtccttctttcgtaattgctagcgtgtgctcatattgcgcacaccaaccaccatcttgagtataagctgtccagccgttaggatccatcttcatttgccaaacaccagtattaatcattggttcaatagtaataaccatgccttcttttaatcgtaagcccttgccagccacaccataatgtggaattgcaggttcttcatggattgttggtccaattccatgtccaacaaaatcacgtacaactgaaaatccctcgccctcagcataggtttgaatagcatgaccaatgtcaccaatacgattgcccacctgtgcttgttcgatacctaagtacatagctttttttgttacttccattaaccgtttaatttctggtgtcacttctcctaccgcataagaccagcaagaatcagacattgcacctttatactctacacacatatcaaccttgattaaatctccattttttaaaggtttttttcttggaaaaccatgacaaatctcgtcgttaatactgcagcaggttgcatattcgtatccttcaaagccgatttgagcagccacaccaccatgactttcaataaagtttctaacaaagttctctatatccatactggtaattcccggctttatgaaatcccgtaaatgacgatgcacatcagccagtaattcacctgactcattcatcatttcaatttctcggggtgatttcaaagtaatcattttctcgtctccttatttttgttaattatattctggtgaaaatattcttgtcggtcatccagctaagcgaaattctcttgattggaattaatgccgctttaaaagtctgtgaatctctggacgaacatcctttttcatcttgtccattttaacataaccctattaagcgaacaaatggttagagaacagtgatttccttttgatttctattttgatataatgaccataaatttagcttaaagctacggatgtccgttcaactttaattagttcttcttgctttaatgagaagaccgattcgacattcgaaattgaatgaaattttccttgtaaaattaattcattcaaattaataaggaggaattcttttgacattagcaaaaattgtttacgccagtatgactggtaacaccgaagaaatcgcagatattgtggctgaagccttcgaaaatttagatgtagatgtagaaatcgatgaatgtacacaggttgacgctgaagattttgaagatgcggatatttgtgtggttgcgacatatacttatggcgaaggcgaccttcctgatgaaatcgtagacttttacgaagaactacaggaattagatctaaacggaaaaatttttggtgtttgcggatctggcgatacattttatgatcaatattgtaagtctgttgatgattttgacgccgcctttgcaaagactggagccactcgaggagcagaaagtgtaaaagtggaaatggctgccgaagaagaagatattgaaaacttagaagctttcgcgaaaaagcttgttgcagctatagcataagtgaaacctagatgtaccaaaacaattggtgcatctttttttgttttatgaaggttttcagaattattatatacattaatgaatctcattttctttttagaatatcgaagaaatgctaagataggactatcgaattggagggatagaaatggttttagctaattttgacacactcttagaaaaatatgcccatttaattgcaaaggttggtgtaaatgtacagaaaaatgacactgttgtcgtatacgccagtgttgatcaagctgtattagctcggcttgttacaaaagaagcttatcaattaggcgcagcagaagttattgtccaatggaatgatgatgaaattcaacgggagtttttgagtcatgcagcagaggaacgaatcaatgaagttcccacttataaagtagatgaagcaaacacatttgctgaaaaacgggtcacccgaatcagtattgtttcacaaaatccagatgctttattaggtgtcgatacaaatcgtgtagcaagctatcaagcagcccgtggcaaagcattacaagctgtgatggaagccacgcaatcaaacaaattacgatggacagtagtagctgcatctagtcctgcatgggcaaaaaaagtcttccctaatctcgagtcaagtgaaaaacaagttgacaaactttgggatgaaatatttaaaacaactcgaatttattcagatgatcctgttaaagcatgggaagagcatgatgcagcaatgcgtgagcaagcagaacgtttaaacaaggaacaattttctgctttacactataccgctccaggtacagatattatgattggcttgccgaaaaatcatgtttgggagggtgctggcagttttgctgcagatggtaatgaatttatggctaatatgccgacggaagaggtatttacagcacctgatcgcaatcgtgttgatgggtatatcaccagtacaaaaccattaagctatgccggcacaactttgaatgaaatgaaattcaccttcaaggatggaaaagtcgttgagttttctgctaaagagggagctgatgtcttagcctcattattggatattgatgaaggagcgaaacaccttggtgaggttgccttagttccagatccttccccaatttctcaatctggaataactttcttcaatactttatttgatgaaaatgcatcaaatcacttagcgttgggcgcagcttatcccttcagtgtgcagggtggaacggaaatgaccaagtccgaattggctgaggctggtttgaatagcagccagactcatgtcgacttcatggtgggttctgctcaaatgaatattgatggcattcgtaaagatggttcaaaagttccaatctttagaaatggtgattgggcttaaataaaacaaaaacagcacgcagaattttttcattctacgtgctgtttttacgttctcgactggaatcgaaccagcgacctatcgcttaggaggcgatcgctctatcctactgagctacgagaacatgcctctattattgtagcgattttaacttattttagcaagatgactaacttaaatttaatgaagacattctaaaaaaatgaaaaattacgatggtcctctattactaattcatgaatttttctcaaataagaatccgaagaactttgttgcattcgctattttaaaaagaacaaagggaagagacttatttccgtctcttccctttgctctttttactttttttcttttttggttcgctttgttttattggttcttctgttaaaagctctccgccaaataaatagatcggtgaaattgctaagttcagttttttagcaattttgattaagtctgatttttcttgtggcgtaacaaaggaaatcacaaccccagcgttacccattcggccgactcttcctgcacgatgtaagtaactttcttcgcttaatgggacatcaacattgatcacaaatgacagggcctcaatatctaatcctcgactagctaaatcagttgtgagcaatcctaggatctgatgctttttgaactgctcaatcgcccctttacgggatattttcgattggtccgaagccaaactggcaactggcaactggtgatagagtaatttctcctcagcactgcccatatcacttaactgattaaagaaaatcatccccaaaaattcgggtagatttaacaaacgacgcaactgatcaacttttttacgctcactcgtctctaaataaaagtgttgtacctcaccttgactgtcatcttcttcgcttacatctaccacaatcagctcagattcaatcttattcaattcatctaatacgacatcagcagttgcggaaaaatacagatgttgcgcattgttatccgtagcttttagaatgtttcgaatcaactgcaagctttgaccttgaaccagctggtctacttcatcaaatacgagtgttttgatgttgggagctttgattttttttgccataatcaattccagcacacggccaggtgttccgaccaataattctggttttttcttcagtgcttcttgttgacgtttgacattggcaccgccgatcaaaggttgaactttcattcctgaaccgctgatccagcttcgagcgacttctacaacttgcatcgccaactcctgtgaagaagttaagaccaacacttgactgggaatgccagcttcaagtctattgattaatggcaacaaataagctaaggtcttaccactgccagtcggagcaatacccactaaattttttccttcactaattaagtcataaacttttgattggatcaatgctggtttttgaaaccccgcttcttcccaatttttttgtaaaaatggtacaaaattctgattattcatggattcctctatttctcgtccgcatcaaaaatgatgcccgcactttttcgcatatcatacattacttgattcacatttcgggataattcgacccattcttcatagtccgtgcccaacttgcgatctgttggattcaaaatcactcgggcaaactcgtctgcctcttcaaccatcggattctctaattgatgcacagccagcttttctctacgttggtgatttcgatcatgaaaaatggcttcgctaatagaattgacagcatccatcactaaggttccgttcactaaataaatctcagattgttgaaaactatcattgattttacctgtccgaatcgttacgtcaaaattatcgtatcgtaaaacacctactccaaagccgtcaacaccagttgcgattttttgaccaaaatagacactttcttttggcataccaaaccaagctaacgccgcataaatcgggtatacgcccagatcaaccaacgcgccgcctgaaaaatgcggagaaaaaatattgggttctcctccatccaaaacttgatcgtaacgcgaagagtacttcataaagctaaaatccgcgccgataatttgatctttcgatggtaaaaaatcagcaatcgttttgaaagatttctcatgaatattacgagccgcttcaaagaaaaatactcttttctgattcgccaactcaataatttcatccatttctgtcggcgttgaaaaagcgggcttttcgacaatcacatttttgccagctaagattccttgctttgcctgctcgaaatgaaggctgtttggtgaagcgatataaacggtatttacatgttcaagaccgaaaaacgtatcaagatcagtcgcatactcgacatcgccatacttttcaccaaatttttgtgccgtatctaatcgccgagaataaactgccgccaggcgatatttccccgtctcatgagctgcttggacaaattgatcagtaatccaatttgttccaataatacctaagttaatcataattttctccacctttcactcattgatttggatcaataaattcttgtttcagatcaaaggagacagactctttaatcgaaatggtttcctgatctacttcacaattatacgctaaaatttgcacaccgtctgccatagccatttctgctgcttgataaagtgccggctgcatcagacggtgaagcgtcgccgcttggattgcagaaaattgtacgataaataaaacataacaatgatagtccaaggcttgagcgactcgtaattcctgcacatgctttaatcctctgattgtcggtgcatcaggaaaagcgccgatcccctgattttctaatgtcatcccttttacttcaacaaatcccttttcttgttgatctgtctcaaaataaatatcaaatttcgagcgttcaaagacatattcccgttttaaataaatgatagaaccttttaatccaggtaaacagatcttctctgccaaaattccttcagctgctaaagcattaggaatctgtgaatcaatattaatccacatatttccttttttgactgcaacaagatcataggctgttttccgtttgtcagacggttgatgatttaccgctactactgcgttggaaagtaataattctttgcaccgccttgtattttttacatgagtgataatctcttctccagattctaataaccgacaacgggcaataaatcgattgcttctttcagtaaaagctgctaagtgaatctccgaatacttcattaattatcaaaatccttctaaaaatagttaaatagtccttaagtcggatggaaagatgacagactttattatatagtataacaaagcctatgagaatgtccgtaaattttatatcttacattctcagtcaatgaaataggctaagaaatccatcaaatttattaaattttatctatacagttgtgaaaggagtttttggatgagattcaaatggcccgtgttcctcagtgcgacatcacttggtgtggcagcagtaggttcaaaaattattcgtaaacgtgacgcaaaggacttaaatagcctttatgttggttcttgggaattcactcatccaaaagagcacaaacatcacaccattacaatctatcctgatctttcaattgttttagatggcaccgctattatctatcagcttattgaattgagtgagcaaaaattggcaattcaggatcaatatggctatcatttattgatcaaaacaaagaatggtattccggttagcctttatgatgaattagatgatgtctcttttccaattacccctgtaaataattagacaaaaacggatgccaatttggcatccgtttattttattgatgaatcaacgaacgtagaatctgatccacgttttctgcggctttacggccttcacgaattccccaaatgacaagacttggaccgcgtctagcatcacctgccacataaactttttcattatttgtcgtataatcttcatagatttcctgaaccccaaaagtgtcaagtaaattcttctcggctcctgtaaagcccatcgctaacaaaacaaggtcagcttttaaagttttttctgttccggcaatcggttggaactggctatcgacttgcgttgtctcgatcgcaattacttgtcctcgttcagcaccaataaaagcagttgtagaggtattataagaagttagctctgagttcttcaatgcgccctcttcttgtccataccctacgcgattaatcattgaatactccggccaaggattatttgctgtacgctgagcaggtaattgcggggtgatttctagctgtttaacagaagctgctccttgacgaatcgctgaaccaatacagtcatttcctgtatctccaccgccgataacaacaacgtgcttaccagcgagctttcgatcagtgactttttttccgtgcttcattacgtcttttgtacattcagtcagataatctaccgcaaattggatgccatgaagctcacgtcctttgatttttagatcccgcggaacgctagcgccactagcaataataatacgatcgtattttgcttgcagctcatctgccgtaacgtcaacgccaacttctgtactcaatacaaatgtaatgccaacttcctccattacattgattcgtcgttgaacaatttccttatccaatttcatattcggaataccgtacatcaataatccaccagcacggtcacttcgttcatagaccgttacttgatgacctagctgattcaaccgccaagctgccgacagtcctgctggaccagaaccaatgattgcaaccttgaagtcggtccgttcagtcggcatgccatcagctttgacccaatcctgctcaaaggcattgtcaataatgaatcgttcattatcatggatggctacacctgagccattcaaaccttctgtacaagatttttcacaaggcgctggacatactcgaccagtcatttcaggcaaaggattcgttttagctaaacgatcaaatgcatttttgaaatcaccgcggtagacataatcattccattccggaatcaaattatcatttggacatcctgagacagctctttttccgccatagaaaattccggtatggcaaaaaggaattccgcagttcatacaacgcgctgcttgtttttttcgctcctctacaccgagtgggttttgtaattcttcccaatcttgaattcgttcttcaaccggtcgataaggattgtctttccgaggatattttaaaaagccaaatggatctgccatcctagccacgctcctttccagccggtacggtttgttcgccgatcacttctataaacgctttttcgatcagctcatcacctgctaaaccggttttggctaattcttcagtcacacgaaccatttcgtgatattctcttggatatactttaacaaaatgcttttgagcattttcccaatcattcaacaactcagcggcctttaatgaatctgtgtaagtcaaatgcttctcaatcatttctttcaagacagcatcatctccggtttcgccgagtttataaagatccaccatctctaaattacatttgtcagcaaacgttccgctcggatcatagacataggcgactccaccagacataccagccgcgaagtttcgaccagttgggcctaaaatgacagcaacaccgccagtcatatattcacagccatgatcaccgactccttcaaccaccacgttggcaccactatttcgaacacagaaacgttcgccagccttcccgcggaaatagccttccccacgatttgcaccaaagcaaactacatttccaacaattggagaattttccacgtcataagcagcatctttaggcggtacaataatcactcgccctccacttagtcctttggccacgtagtcatttccttcaccaattagtttcagctccatcccttgtgtgataaatgaaccaaaactttgaccagcaattccggtatatgtgtattggatttgaccaggagtcagctgataattaccaaatcgttcagcaatccatccgcccattcgcgcgccgactgttcgattgacattattaattggagcgctcattttcacttgctccccgtttttaatcgcgccttctgcaaattgatccaattcaggccattcgcgtttttctttaaacggatcttctgttttacgttcgatgccaatacttgttgataacattcgagaaaaatctaatgattttgccttgccttttgcaataaagcgcggctccaatacttctgtgtggccgatcatttcatcaatacttctaaaacctagttcagccataatctcacgcaaatcttcggcgataaaatacatcatattgatcagatgctcaggtttcccaacaaagaatttacgcaatgctggattttgtgtcgccacaccgaccggacaagtatttaaactacacacgcgcatcattacgcatccaatcgctaccaaagcaagtgaggcaaaactatattcttcggcgccaagtaaaatcgccatggcgacgtcacgaccagtcatcaatttcccatcagtttccaaggtcattcgttgacgtagattattcatcgctagggtttggtgcgcctcagcgacacccatttcccatggcaaacctgcatcacgaatcgagtttcgcggtgaggcgccagttccaccatcgtaaccagaaatcacgacaacatctgcgccagctttaacaacacctgttgcgatcgttcctacaccggtacttgaaaccaatttaacattgatcttcgcatacggattaatagcttttaaatcataaatcagttgcgctaaatcttcgatcgaataaatatcatgatgcggcggcggtgatatcaaacgcactcctggcgtcgatcctcgaatttctgccacccaaggaaataccttgttaccaggcagctgtccgccttcacctggttttgccccttgtgccattttgatttgtaactcttcggcactcatcaagtattcagcgtttacaccaaaacgacctgaagcaacctgtttgattttactattataattcttgccatctgcttgcggtttgaaacgtttacgattctcgccgccttctccgctattggatttcgcgccgatactgttcatcgcctcagcaatacattgatgggcttcttcactcaatgaaccataggacatcgcaccaactttaaaccgtttcacgattttagttgcgggctcgacttcagaaagcttcactgccggacgctcttttttaaattcccataacgcccgtaagttagtaggctcttctaacgcttcctgattcatctgatcaacatagtgtttaaatagttgataatctcccgaacgaaccgcctgttggaaattgtagatcgtcttaggattgaacaaatgatgttcaccatccgctttgtattggaaactaccgccagatgctagtaaatcattttgctgtggcccataagctaattgatgacgttgtaagtattcttcttcaatttggtttaacgataacccgccaatacggctcgccgttccagtgaagtatttttctgtcactggttgactgatacctacgacttcgaataattgagcgccgtgatatcccgcaatcgtcgaaatacccatccgtgacattacttttacaattcccttttcagctgctttccgataattttccagaccattttcaatgtcaaagtcattcaaagttgcatatgcgccataaggatgaatgccgctagcaccataaccaataagggtggcaaaatgatgtacttcgcaaacttctgctgaatcaacgactaggctcgctaacgaagcttttccttttctcaccaaataattatgcacacctgagacagccagtaaaatcggcattgccattttggttttttctgcgccacgatcacttagaatcaagattgtcccaccattatcaatagcggattcagcttctttaaacatttgttccaagccatcttctaaagcattctgtccaccaactgaatataaggttgagatagtcactgctttttgttcttttgtgttcaattgaacgattttgccaaaatcagcactgctgagtacaggacttttaatttttaatttctgacaattatgcgcatcatcaactcggatatctccatcacggcctaaaaacatttctgttccaatcactaactgctcgcgaatcgcatcaatcggcggattggtgacttgagcaaattgctgtttaaaatacgtgaacaaagattgtggcttgtcactcaaaactgccaatggtgaatcatatcccattgaaagaactggttcctcacctttttccgccataggtaataattcatcacggataatttcatccgtgtagccattcaacttccacatcttttgcagttcttgttcggtcaacattgctgcgtcttcttccgcttctgcaagttgtgacagttcaattcgattctcggccagccaatctttataggtatgggatttggcatacttttccttaatttcttgattacggtaaaattttccgttgatagtatcaactaaaatcatatttgctggtcctagaacacctttttcaatcacatttgatggttcaaagtcgaccacgcctgattcagatgccacttgaacaaaaccatcctttgtaatcgaataacgagaaggtcgcaagccatttcgatccagcgttgcgcccaccatttcaccatctgtaaagcataatgccgccggtccatcccaaggggccataaaactcgcattatactcctgaaatgctgtcatttcttcccctaggttggccttttccgaccaagcttctggcaccatcatcatcaatgcatgaggaatatcacgaccgttgcgatataaatattccatacaattttctaacttcgctgagtcagaatcttcttcgttatacacttcaatgccatgactcttcatccaattttctgaaccacgcaacgtgttgatttcgccattatgagcaagaaatcggaacggctgagcgcgatcccagctaggaaaagtattggtagaaaaacgggaatgaacaactgcaatactagctgcaaaatcttcatcctgcagatcatcataaaaaatcccgacttgataagcatgcagcatgcccttataaacgattgttttgctagataagctacagatagccatttcgcctgcatggtacgttctctctaatttgcggcgcaatcgatacagtcgatcttcaaaatcgcgatcagtctgaacttctaatggacgctttatgaataattgcacaaagctaggcatcactttttgtgctcctggaccacaattctcatattggaacggaacatcacgttgccaaaggaccaagtacccggctgcttcaatttcttttacaagagcttgctgtaaaccgttcttgtgtttttcttccgctggtaaaaagaacatccccacagcatattgaccacgatcaggtaaatttaccccagcagttttcgcttcacgttgaaagaatttatctggaatcgtcgctaaaatcccggctccatcccctgtttcaggttccgctcccgttcctccacgatgattcatacgttctaacatcgttaacgcatgcttcactaattgatgtgaagccttcccttccatctgagcaataaagcccataccacatgcatccttctcgaatgagggatcatacatggtcggggcctctgttacttgttgctttgtcattgacatcaatcctttaaatagtttgacaattctcatttatttttaatatactacctttttttttttagataggcaaggattcttagaatattttttttattactcatgttatttgtgtagcaattcttcaaaacaccggtccaatcaaatggaaaaaatgtgatatgtttggtaaacttaatctgatatgcctcgttacgaaaggatgaacatcaatgacaccgaatcgcgaagactacttaaaattaatattggaattaggtggcgacaaagaaaaagttagtaataaaaaaattgttgctggtttgtccatttctggcgcttctgttagtgagatgatcaataagctagtgaaagaaggcttggttgaacactctccttaccaaggtgttcaattaaccccgatcggtttagaaaaagcaagtacactagtccgtaagcatcgattatgggaggtctttttagttgatcatcttggttactcatggaatgaagtccatgatgaagcagaagtattagagcacgtgacctcttcacaactagaacaaaaattggatcattatttaaatcatccaacattttgtcctcatgggggaatgattccacagcaggatcaaacagttcacgaaaaagatcgtcaaaccttagcaagttatcctgaaggcaccaatgttcgaatagcccgtgttttggatgaaaaggatctgctcgattatttgatggatctgggcgtcaaaatccatgaagaatacaagatcacaaatattgctgcttatgaaggaccaattactttacaaaatgaacaaaaagaggtttcaattagttacaaagcagcgtcaacaatttttgttgattcactgtagctggtcattaacttgttattattaaaacgaactaggatgttaatccaactttttacagcacacatcaatcaagtgaggatttcgattttacttctcacatgagatacattgcttagttggatggtattcgtggagagaaaaataaattcattaaaagaaactaggagtggaatatatggaacaggcagcattatttaccatatttggtggaactggcgatttagcgaaaagaaaactatatccttcgctatttcgcctatatagaaaaggcaacttagcagagcattttgctgtaatcggtacagcgagacgaccatggagtgatgaccactaccgcgagatcgttcgcgagacgatcaaggacattgcaccaactgaggaagaagcagaagaattttcaaatcatttttactatctgtcccacaacgtcaacgatactgaacattacgatcaattgaaagaattgtctgatcaattagatgacaaatatagtttaaaaggaaatcgcatatattacttagccatggcacctcagttttttggaacaatcgtcaatcatttaaaatcacaagaaattttgacgtccaccggttacaatcgtttagtaatcgaaaaaccgtttggctttgattatgattctgccaatgagctgaacaaccaaatccgaaaagtttttccagaacaagatattttccgaattgaccactacctaggaaaagaaatgatccaaaatatttcggtgatccgctttgccaataatatctttgaatccctttggaataatcgctatattgaaaacgtacagattacattttccgaagcgcttggagtagaagatcgtggcggttactatgaacacagcggtgcgctaaaagatatggttcaaaatcatatcctgcaagtcgtagctttactagcaatggaagttccaacttctttctccaataaatccattcgtgaggaaaaagtaaaagttttacaagcaattcgtcgctatgattcagaagaagtattacaaaattttgttcgcggacaatatgacgcaggaatgttagatgacaaaaaatttgttgcttaccacgatgaaccaaatgtttctgaagattctttgatggaaacctttgtagccggaaaatttttaattgataatttccgctggtcaggcgttcctttctatgttcgaaccggaaaacgcatgactgaaaaaggcacaagaataaatatcgtctttaaacaagtccccgtcaacgtctttaatttcgagcaagaagaagccggtggtggagaattaccacaaaatattttaaccatttacatccaaccaacagagggcttctcgttaacccttaatggaaagaaaattggtcaaggcttcaatactgaaccagtaaaattagacttccgccaaagtgctgaagtcacagaaaacagtcctgaagcgtatgaaaaactattgttagatgccttaaatggtgacagtaccaacttctcacattgggatgaagttgcaaactcatgggagattgtggatcgcatacgtaatacgtgggatcaaactacaccaggctttcctaactatgcagccggtacaatggggccacagtgtgccttcgatcttttagcgaagaacggacatgaatgggcttggcaacccgatcaatggtaccgtgaacgcggacaattagaataaataattaaagctgggaaatttttctcagctttttttgtatagctacctcaaagacatatgaataaaaaatcataaagatttgacctgactcgaataatcatcgtaaatgcctaataactcggtacctataaagcctttccacctccatctatacttaagttatcaagtgaaacggaggtggttctttgaaaaacacaaatgacatcgttcctattcaacttcacgatcaagcaagaacggctcgtgatcagaaaaagaacagtaccgcaaaaattgccctgcgtatccgtcagaaagatggttctgaagtcttgatctataatggcgtaaacagctacatcctctcggcgattcttaaggagttgggataagatgtttctcgattttaccaaagtagaaaaaatctttctcgtaaccggtaagaccgatcttcgtaaaggaattgacggactcgccaggattatccaacaagactatgagttgaatgtttacgaggatgccatttttcttttttgcggcaatcgatgtgaccgatttaaactactctactggcataacgatggcttctttctcgggtataaacgaatcgaaaacggccggctccaatggccgagaaaaaaggaagaggttcgccaactgtctgtgcaacagattcactggctacttgaggggttaagcattcaccaacccaaagcaattaaggccgggacaaaaggtttcttttgaacagagaaaatccgcggaatcattgattttatgcggttttctctgtttttcgatgcgtctaaatggtataataataacagtagtaataatcagaatggtggtgaatttcttgtccttacacacaaattctacttctaacaataacgtcgaagtagatgtgactatcctgcttcaactccttgaatctcagacagaaacgatcaaagaactccagcgcgcgaatcaagcattgaaccaagaggttcatcttctcaatgaaaaattgagctactttacggatcgtttttttggtcgttccaaagaaacactggattcacaagtgactggtcagttaaatctatttcctgatgaggttgaagagagtaaggccgtccctaaaacagaagaaggacaagaaacaacagtaaaaggacacaaaagaaaaatcggtcaaaaagcagcgaagatcgcccatcttcccttaaaagaaagacaccatgaattgtcaaaggagcaacgaatctgtgaccaatgcggcactcaaatgacagacattggcacaaccaaaattcgcgaagaagtgcttttccaccaagccatgttggatcggctcgttcatttacaacatacgtattgttgcaaagaatgcgaaaaggcagatatttcttcctataaaaaagcccttgttccacgacctgtcgtctccaatagtttaggatcaaacagtgtgattgccgaaactatccgattgaagtttggacaaaaagtacctgccaatcggcaggaaagctattggcaagaaacactgggtctggatatttcacgtgataacatcaccaactggcatatcaaagtttgtcataacgccttagacagtttagcccaacgattaaagagccatttaacccaagaggaaatccttcacgccgatgaaacaacgtatcgggtcattgagaagggcaagaaagacacgcattattggctattcagtacaggaaaacatagcacacagccaatcgtgtattatcatcacgcccaatcgcgagctggcgaagtgccgaagcaatttctagcagacttcaacgggtatctgcattgtgatggctacgcaggttataacgcggtagaagatgtcacgctcgtttattgtttggctcatgctcgtcggaagttttttgaagcccttccaaagaacaataaaaacgaggaaattcctgcttggatcgcggtaaaaatgatcgatgtttggttccaattggaacgagagtgggtcgacttatccgctgaagatcggctgaaaaaacgccaggactatttaaatcctctattcatcaatttctatgaatggttgggctcctttacagcagttccgaaatcaaaactagataaagcggtcaagtatgcgttgaaattgcgtgaaggatttgagcggatttttgaggatggacgattggaactcagtaataacttagccgagcgccaaattaaagagctagtgatcggccgtaaaaattccatgcattcatgtagtttggaaggtgcacgaacttcggggattatcctaagcgtgtatcgaacagccgaagcaaatgagctaaatccagtagcctatttggaatttctatttgatcgtattccaaatctagcgcatgtttctaatgaagcgttggatgaacttttgccttggcgccctctagcacaagcagaatgtggtaaacagtacgcaaaaacaaccaaataacttaagtccattatagggcttaggttatttggtgtgtaggtacttggtgattaggcacttactaatcatcgcaacatttaataatcaaaacattttgagaaaagctaaagaacccgcatcgaactactccgatgcgggttccttctattatagtcttttattctaatccttctgctactgcttctggatagttttcttctacaatttgggcacatgaggcacataaatgcggaagcttttcatcttctccaactgtcgtgcgaacttgacggcaacgatcacaaacttcgccatctgctttttcaactaaaatcgctacatcatcaaataccatagcattttctggtgcagtattcatcgcgatactgaatgaatccggtgatacgatcaacaattgtgctagatcagcatctaaagctgtcaacatcgtagccacttgttcatttggataaatggttacttttgcttctagtgatttgccaatcactttttcattacgagcttcttctaaagctttcaagaccttatcacggaaatccataaaggctttccatgtatctagcaattcctcttggttagggaacgtttcatagcttggcaattccgctaactgtacgtattcttcttcttccttcaagtacgtccagatttcttcggtcgtatgaggaataattggcgtcaataacttcgtcaatgctaccgctgcttgatagaagaccgtttgcatgcagcgacgttcatagctgtcttctgcttgaatataaacaacatcttttgcaaaatctaaatagaatgatgatagatcaactgtcaagaagttcacgactgtcttgtagatttgtgtgaaatcatatttctcataaccttcttcacgaatcgttttgattacttcattcaaacgaactaacatgtatttgtcaaccgaacgtaattcatcataagcaaccgtgtgtgtcgaaggttcaaaatcactggtattcgctaataagaaacgcatggtattacgaattttccgataaacttctgaaacttgattcaaaatatccatcgatacacgaacgtctgcttcatagtctacactgctaacccacagacgtaagatatcggcgcccatttggttaatcacttttccaggaacaattgtgttacctaatgatttactcatcttacggccttcgccatctagagtgaagccttgagaaaggactgatttgtatggcgcaacgccattaatcgccacacttgttgtaatacttgaattgaaccaaccgcgatattggtcagaaccttccaaatacatgtcagccgggaaggtcaaatcctcacgttgacgtaacactgcttcgtgagaagaccctgagtcaaaccaaacatccatgatatctgtctctttagtaaatttaccattcggtgagcttggatgcgtaaatccttcaggtaataaatcttttgcttcacgttcaaaccaaatattagaaccatgttcagcgaataattgcgccacatgctctgtagtttccggtgtgataattggttccccatcttcaccatagaaaatcggtagcggcacaccccatgcgcgctgacgagagatcacccaatcaccgcgatcacgaatcatattatacagacgagttttcccccatggaatgatccaatcaactttttcgatttcgtctaagatatcttgacggaacttatcaattgaggcaaaccattgtggtgttgcgcgataaatgattggttttttcgtacgccaatcatgcggatagctatgagtgaagaattctaacttcaatagtgctccatttttttctaacaattcagtaaccattggattaaccttgtcataataaacaccttcaaaacctggcgcttcagctgtcattactccacgatcatcgactggagaaataatgtcatttcggtagtttttccatgcaaagtagtcatcttccccgtgacccggagaggtatgaaccagtccagtacccgcgtctaatgttacatgatctcctagaataactaaggattcgcgatcataaaatggatgctgtgctgtcatgtattcaagatcttttccagaaacctcttcgagaactttaggattttcccactctaattcctctgcaactttctctaacaaatctttcgcaacaacatatttacctcctgccgcttctaccacagcgtaagtgtaggcagggttaaccgagattccttggtttgctggcaaagtccacggtgttgttgtccaaataatgaatgaggtatccgtatctaatatcccttttccatcctttactttaaaagcaacaaagattgaaggagatttgacatctttatattcaatttccgcttcagctaatgaagattcacttgaaggtgaccaataaattggtttcaaccctttatagatataccctttttcagccattttaccaaatacacgaatttcagctgcttcataatcaggtgtcaatgtaatatatggatgttcccaatctccagcaattcctagacgtttgaaatcttcgcgctgcttatccacctgtgacaaagcgtattcttcacattttttgcggtattcggccatcgacatttctttacgcttaatccctttgtttgttaaaacctgttcaattggcaaaccatgcgtatcccagccaggtacataaggcgcacgaaaacctgacattgatttggaacgtacaatgatatctttactaattttatttaacgcatgtccaatatgaatgttcccatttgcatatgggggtccatcatgtaaaacgaaggttggtttgccttcatttagtttttgtcgcttttcataaatgttgttttcttcccattctttttcccactgtccttcacggttaggtaagttgccgcgcattgggaatccggtttttcctagttgaagagtttcttttgtcttcactattgatcgtctcctttaaattataaaattgaacattagcgatacagtaacttagtttgtcgcttttttttacacacgtaccaaaaaaaactggtaacctttgttggaattctcttaatggataaatcaacaaaaaaacaagcttatccgcaaagggacgagcttgtcgtggtaccacccaaatttgaaacctaaagtttcctctaatcatcgttaacgcaatgacacgtcgattattacttttaattcgtaaccgaataatccagaggatctttctaattagagtgtctgccgatcttccactatcatcggctcgctaataagaatctaactagcttttctgttctagatttctattcttcgtctgatttaatcaattcaggaatatcaattgtcaagcccatatcttcttgaggctcctcaagaacaatggattcacctgagtctactgcattctcagtatcgttgtcaagttcatttgctaaaacttccttcaatacctcatgaccatcaccaacatatgaagacattggtttcaaaacttcttcccagtcgccgctgcgtgcttgatcgatttgagtttctaacaataatagtaattgttgatggaagacacgtgtcttcttctttaaatcatttgtttcagcagccaattgacgagctttggaagtagcatctgttaaaatttctttagccttatcttctgcagtcgttgttaataagtttgccttttgcatcgcattagaaattaattcatccgcacgattttgcgcagaagtcacaataacttcagattctttacttgctgaagatttcactttatcggcagtatcttgtgccacgacgattgattggttcaacgcttctttcaattcattgaaatactctagtttttcttctgaatgtttcaatgctttttctaattcacgattcttagcgatgctgtcctcatagtcgcgaacaatcatatctaaaaaatcatcgacttcgtcttggttatatccacgcatcttagtggagaaatttttgttttgaatatctaatggagttaatgccatttttttgctcacctcataaaatttattttcgtaaaacgcctaagcgcaaacggaatttttctttctttgtttttccttctaaaccttggatctgaattcgcccaaacccacgaactgaaacgacatctaataaatcaagtaaataatctggacgctcattgaccgaccagttcacttttactttactggcttcaactaattgctttgaacgctgtcgtgaaatattataaacagttgaaataatcgcatctaatcgcatggatgtggcggtcgttgtttcctcaacccaactatctttcggaataatgatatccgtatacggacgttcctctagatggacggttacacgaccaattttagttacctgacctacgatataattagccgattctttcgctaaaaaaatttgccagcgatcaccatcagaaataatatccccaaaataatcacgcttaattccagcattcattaatgttcctaatattttcccatgtgaaagttcagtaaattttttcggataattaatttcaatcatcacaagctcaaagtcgtcggtttgcggttcataatactcgggataaatcatgcaacgacaccgttcagcatgttcatagccgccataaaatgaaaatttcaattcactattttcgcgaattaacgtctccaagatataggcttgccgaggatctaaaaaattcgtcagataaggagcgtattggctttcaacttgttctagccaatcgccaacactgtcaacaaatggatgctcttcaggtctaaaatgttgatagacatttgcattcatattgccacctccttagtagataatactatacaaaattctttgtagaacctccatcgcaatatttaatgctaaaatcgctgccattacagaaaaatcgattccgccaaattgcaaaggcaaacgtcgaaataaatcaagaaacggttcacaaattcgacctaatagttgaccaaatttagactggtaagcaccaggaaaccatgacattaatgcataaacgactaaaagaatcgtataaagataaactagtcgatttaaataataaaaaagtgtaataagtagattcaactatgcggctcctttacatttctaatccgtaaatatcttcatcaaccatggagctcaacgtagagttggtaatttcaacatttgttggcgtacataaaaacatttcatttccaacacgtttaatatcaccatcaatcataaagactgcaccagttagaaaatcgaccacacgacgcgctctcatttcatccaaagattgaaaattaattaagactacctcaccttgacctactcgtttagctattgtcattgcttcattataggcccttggttctactactgaaatacggtcctttcttttttcttctgttcttggtgtaagtcgttgcgctcgattattattgttaggcatagacacgactttttcgcttttcttcgccatgctttctgccctttttgccacagtttcagctctgcgatttgtctgaggttctgcgactggttggctgacccgttcctgctgtattctttctttttgacgttccggagaacgttcctgcttttgatacgtaggacgtgttgccacgcgttctttcttcaaaggtgcgcttactgggcggctaacctgcttctttggagcaggtgtcgctgcttcttcatacatatcgtcatctgctaaaccaaaaaaatcagtgatctttgctagactaattcccattaactttacctaacctttcttaaatagtgccgttccgattcgaacaaaagtagcaccttcttcaattgccgttttgaagtcttggctcattcccatgctcaattctgtgcatggcgcatattgcaagtcttgttccttcacactttcttgaagctgtttcaaagtagaaaaaacattccgaatctctaactcagttgcctcatatggcgccatagtcattaatccgatcacctgaattttctctaatccctctaattctttaataaaggattgaaggtcactcggcctaataccatgctttgattcttctccggaaacatttacttcaataaaacattttatttgatgttcagcacgcttttgtatttcttgtgccaaccgtaaactgtctaacgcatgaaagtaatcaatttcatttataatcaattttaccttgcgacgctgtaaattaccaatgagatgccatttgatctgctgatagtttgaaagacttcgctttttatccagcaatttatctactcgattttctgctaaatccgtcacacctagttcaacgagttcgtttgcggtcatggagtcgacactctttgtcaccgcaaccatagtaatttcctctgggttacgtgaagcaagagcacacgactcctgaatctcttgctcgattctatgcaagttttcagcgatcatgtgctctcccccttttattttctacggcgaaagaatggtggtgtatctagttcttcgtctttttcaggttttacttcttcacgattgaatgtttcgaattctttcttttcgatgttatcaaattgtgtatcttcaactttaggacggatattttcttccttgcggatatcccattcaccaaaagcagactgaccatcgttgcttcttgcaggttcaatatctaaattttgtttttgtggaactgattggatttgactagcacgttgtgtattacgtgtagccttacgctccttttttgttggatcgattcctgtcgcaattactgtaacgcggatttcatcgcctaattcttcgctaattgatgtacctaagataatattaacatcccctgttgctgcgcttgcaacaatgtcagaagcatcttgtgcttcaaataaagtcatatctaatccaccagtgatgtttaatagaacttgttctgcaccatcaatagatgtttctagcaatggagaggaaatcgcttttttcgttgcttcaacgacacgatcttcgccacttgcaacgccgattcccattaaagcagtcccttgatttgccattacagttttcacatcagcaaagtccaagttcacgtaaccaggtgctgtgattaaatctgagataccttgaacaccttgacgcaaaacgttatctgcttcacggaatgcttcaagcattggcgttttcttgtcaactacttctagcaggcgattgtttgagatgatcaataaagtatcaacattttcctttaatgctgaaatcccttctgctgcgaaacgtccgcgttttggtccttcaaagctgaatggacgtgtaacgacaccgacagttaaagcaccgagatcttttgcaatcttcgccacaatcggagcagccccagtaccagtacctccgcccattccagctgtgatgaaaaccatatctgcaccttctaatgcgtcacgaatagcttgttcgctttcttcagctgatttttgaccaacttctggttgcgaacctgcacccaaaccacgagtatatttagggcctaattgaataactgtttctgcttttgagtttttgagtgcttgaacatcagtgtttgatgcgatgaattcaacgcctttaacgttttcctcgatcatacggttgatagcattgccaccgccaccgccaacaccgataactttaataacagcaccttcgttaatattgttatctattgagaattccatgttttctattcctcctacaaattaatcaaaaatattagagaagaagtctttaatcttcccggttactttttcttcattttttggctttgtttcttcttcataatcatttgatgcttcgtaatcgtcatacacaggtgctgttgaaacagcgttggtttgtggtgaagcagatagtgaaactttttcacctgtaaccgctgattttgccaaatgatagacatcactcaattcagctgaataattgacgatactgatgacatttgtaaagactggatttctcaagcccatttgattcggtacatgcaatttaactgtggttccaaaaatgtcttccgctaaatcaaccacacctggtaaacttgctgcgccaccggtcaggacaacaccacctggtaaatcaagtgcttcgatttcatctaaagcatctttggctttacggaatatttgttccaaccgtgcttcgataatttcagccagatatcgttcatcaactttaactggatctgtttttccaatgacatcaactggaaaatcttcgtcagcagatgtccggcttggataagcgtctccataattgatcttcaacgcctcagcattattaaaagaagtatttaaaacgatggagatatcctttgtaacaaattccccaccttcttgatccacatgtgtgaatttcaactgtttatcatgcataactgccgtcgttgtttgtccaccacccatatcaatcacaatcgtgccaaaatccttttcaccatcagataaaatagattctgttaaagctaaggatgtaattactgtttcagcaaccgataatcctgctttttcaacacattttgtaatattatggatgatcgtttttggaccagtaaatactaatccaaacatttcaagacgaacaccgatcatgcctcgcggatctttgataccttcaaatccgtcgacggtaaattcttgaggcagcagcgcaacgatttgtctttcaggaggaactgaacgaaccattgctgctgaagcgacattacgaacatcttcatccataatctcttttgactcattattaacagcaatcataccttgacaaggttcgacttctaacaagttagcaggtagtccaacgctgacacttttaatctgaatcccagctttttcctcggcctgttttactgctcgctgaatcgcctgtactgtcttatcgatatctacgataatcccacggttgattccttctgattttgcgtttccaacaccaatgatattcatttggctatcgatgtactcggcaacaacaactttgatcgatgttgtcccgatatcaaggcctacatacattcctgcttttgccatgaatgggattccctcctattttcaaataaatgctttattcagatgtaatattttaacttactgttaagcatgaaatataatttttcgcaagtaattcactgccttcaattttaacacattttgcctagaatgaaaaagaagattcaacattttcttgtaataaatttaatcatttacaacagcggttccagattgatctgttgagttttgtgttgcatcctcagtagttgaattttcagtatacggatagctgtaaattcctgcttccatatctacgatccccttaattcctttgtcactcatttctttcgcaatttgaggataatacttcattttactggctaaatcgttaatgctgactaagaccttgttcccatcattcatgaaaatttccaataattccttgttttcatttgttggggaatatttaatctgggatatgccttgtttaacctcttcagataattttttatagccttcaagtacttttagaattctttttgatccggtgaagctttctagaattggcaggtcaccatcgcttttttctacttcaatcggaataattttaccatttgaaatgacaggagaatactttccatcattttctaagtatgcgacttcaggatattctttcacatctaccacaaaatgattgatcccatctaggtgaacttctgcattttcaatttgcaattcttgctttttcagatttttcacgttatctttacgatcaaaatattgactccaaagattgtcacccacgctaaaattcagttctttttcgattatctctgttgaaatcttctcattaccttttatacttacaccgcctaacttagctagtggtgatatgtaatacaataataataaggctggaattgaaaataacccgattaaaatcaaggatctctttacgagccgtcgattgcgctcatgtttgatattaggtaatcgttctaaaaatgatccatttttaggcccgcttggtgcatcctccatctcaggctcttcaatttcagattctaaaggtattgtatctttttgttcaggctcttctaatttttcttcggcaagtccatcagtgttagaaagttcgtttgtctcttcagcagttgctgcctgatcaacagtttcacccttttccagcgctttttgtttcaaatattccatattcgctaactgccatggggtcaaattctcttgctttgttttttctacttgctgattttctttgccttcctccggaaactcttcacgactaatggtcctcacctccaaaaaactattttacaatctcgttaactaatgaccacaatcgctctgctgcatctgggataccttcttgacgtgaagctttcgccatcattgcctttttttctggatcacccatgatttcatccactgcttctactaatttttccccagttaaatcagcatccgtaatcattttgacagccccagcattgaccaaactctgtgcatttttcgtttgatggtcatttgtgacgtatgggcttggaatgagaatagctggcaaacctaaagctgtaagctctgcgattgaagttgcgcctgcacgtccaattaataaatcaacatttgccataacatctgtcatatttttgatgtacggctgaagcgataggttatgattgattttttcgatatcaaatttttctgctatctcattataataacgatcaccagaagcgtacagcacttgatattctttctgtgaaaatttaggtagtgcttgaatgaccgcctgatttattttgagtgccccttggcttccgccaaaaattaggacagttggaatgtctggcaacagaccatattgttctaatacttctgactttccactggtcaccacttcttgggctcgcggatttccaactaagacagttttattctctggaaaatattgtgcagcatctggaaaactaatcccaactcgatcagcgaagcggctaagaaatttatttgtaatccctggaacgctattttgttcgtgaacgattgtaggaattttcatacgtgctgctgcataaacgactgaaccagaaacatagccacctgtaccaatcactacatctggtttaaactctcgtaagatctccttcgagcgtttgatactttcaacaaataattggactgttttgatattatcaagcgaaagtttccgcttaaagccttgaattttgattgttttaaaagaaatgcctgtctcaggcacgatcttattttccaaccctcgatgcgttcctacatatagaaattctgaatcaggttgaattttttgtacgtaacggataaatgctaaggctggatagatatgtccgcccgtgccgccgcctgtaacaagtattctcatttcatttccctacttttctaattgcttaacagcttgcataaatttgtctccgcgaatttcaaaactaggatattgatcccagcttgcatttgcaggagataacaagatactatctccaacttcactttgttcataggctaaaggaacagccgtttcaacatttgaagtcataataatcgtcctaattcctgctcgttcagccgtctcagccaatttatctttcgtttcaccaaatagaataatcgctttgactccctccagagatggaatcagttcatcaaatccatttccacgatctaatccaccagccagcagaatcaactgttcattattaaatccgcttaacgccatttctgtcgctaagctgttagtcgctttagagtcattgtaaaatttacgaccattgattgtggcaacgtattgtgtacgatgaggtactccatggaaattactcaatgcagtacgaatcccattattggagactccttttaacttcgccaccgcaatcgccgccaaggcattctcaatattatgcgcaccaggtactcctagttcagaagcatccatgattttctcttccttgtaatatagaccgccatgaagaaaataagcaccattttcaattttttctttcgttgaaaaaggaacaacttgagccttcgtttgcttgctcattttttgtaactcttctgaattccagtttaaaactaaataatcatctgctgtcatgttttcttgaattgaccacttcgcggctacataattttcacgtgttttgtgataatctagatgggcttcataaatattggtaatgaccgcaatctgtggcttaaatgcttcaattcccatcaattgaaaactagacaattccataactatatcatcttcagctgttgctttagcagccacttcactgccggggaaaccaatattaccagcaagatgggcctttccagcagtacgttcttgattcaacaatagaccgatcatggtggtggtggtcgtcttgccattcgtaccagtgataccaacgattggacattcagcgacttgataagccaactccacttcggtcaagattggaatatgcagtttctccgctttggccactaacggattatcatatgggataccaggatttttcaccattaaagaaaaatcttcatctagcaattctatcggatgatgcccagtaatcacccgtacaccttgttccagtaagccctgagcctctggattttcttcaaagggttttccgtcgttgaccgtaacaagtgcgcccaagtcattcaacaacttggccgcactaaatccactcttcgctaatcctaagactaatactttttcgttttgatattgtttgatttgtttcatttctagtcatctcctacagtacgatcaataacacaatgatggatgcaatgagcccgatagcccagaacaccgtgtctactttccactctgaccagccagacatctcaaaatggtgatgtaatggcgacattttaaaaacacgcttacctgtcattttaaaggaagtaacctgaataatcacgcttgctgtttcaaaaatatataccaaaccaattagtaacaatgtccactcttgatgtaagataatcgacacggccgccaacagcccacctaaagctagcgatccaacatcacccatgaaaatttttgctggttttttattgtaaggaaagaagcctacaagtccgcccatcacagtaagacaaacaattaaaacctcatactgttgttgtttccaagcaataatcccatatgtagcaaatgaaattgttcctaaaccagataccaacccatcgattccatctgttagatttaccgcatttgaaaaacctaccaaccaaaaaatcacaaacaagccataaataatacttagcggcaactcaatgccgaagaaattcaaagtattgggatagccttccattcgatagattacataaaaaacaatcgcgacaaccacttgagcaatgaatttttgccttgatgtcaacccttcattttgctttttcgccagcttaatgaaatcatctaaaaatccgataattccatatagtaataaaacaaatactaaaattaatagcgaagtcgtcattttatctgtccatagactataccaaattgatgtgattacagcagcagctaaaaagccaagaccacccatcgttggggtaccagcttttgaattatgccacttcgggccttcatcacgaatttcctgtccttgtttcttcattctaaagtagccaattataaaaggcatgcctgccacagtaatcgcaaaactactggcaaaagcaataaatagttgtgccggttgcatgttattctctccagtcctaacctaacgtaattttcagtttctttttcgagacctctgcataaggagcaatactttgcttcgtacagtacccatctccttttttgaagctgacatcaatatctaacagatttgttagttttaagatatctgctttggaccatccacggacatccggcatctcttttttaccattagttagtaaaataagatgctcgttcgccataactttctctcctggcttcgcagactgttcgatgactttatctccatcaccaatcacaacagctgttaatccacgtttatttgcatctgctgctgctttggatgttgaaagattgcggtaatcttctaccgtaaccttcgtattgctttcttcctcagaagaatctgtttcggtattttgaaattccattacacgacttaatagtggattcgcaatttcacccaaaatgccttcttgtttttcttgtggttgtttcatggttaaatacaaaatatattcaggatcttctgaaggaatcatcaacgcaatagaatagatataatttgtatctcccgttaagtatcttccattctctgcaatttgagctgtacctgttttagcagaaatatggtatccaggcactttatattgatcgtatgccgaaccgtagttttcactttcaacagtatcacgcatatattcacgaaccttttgagcagtttctgctgtgattggctctcctacaacttcaggtttcgtaataatctctttccctgtatcaggattggagactttttcaatatagtgaggttgcagcatttttccatcatttgctacagcagtaaagccgcgcatcatttggaaattggttacgccaatggcttgtccgtatgaactcattgcttggtcaacgatattgctcgttggcaatgttcctttagtttcgcctggcaacccagaataagtactttgaccaaaaccaaagcgtttcacatattcaggccaacggtctcctagccgctcttccaatttgaccattccgacattacttgaccaagaaagtgcctgacgcatcgttaatattccttttttacctaagtcccagtcattaatagttgcgtcagccacttggatctttcctgaaacgtaactttcattttcattaaagataccttcattgactgcagctgaagtagtgaaaaccttcatagttgaccctggttcatagctatcttccactaggaaatttcgccatgcatcttcttctcccaaaccttctttggtctcaggattaaaggttggacgctgagacatcgctaggatatctcctgtttttgcctgcatcaacatggcagtcatctcagtaggtttcgcttctgagcttaccttatccattaatgtctctaaataactttgcaaccccgcatctaatgtagtataaatgtcttctccattgactgcctttttttcttccgcaatacttcctggaattggtcgttgattttcatctttttgataaactacttttccatcttttccttttaagacatcatcataagccgcttcaacacccatcatgccaactagtgattcttttttatcaggttgcgcatatccaataaaatgagaagcaaaatttccgtttggatacatccgatcagtatgttctgtaaaataaagtcctttgaccttatcctttttcatcgcatcctcgatgttttgtttcgtttcttcggaaatatttttacctttattaccaaattcgacttgataatacttactagtgccatcactgttaagtccacttttcagcgtctttaaggctgatttttccttgattcctaaatacttgtttaatatagaagctaaatcatcaaagttcttttcttgggcataaagtttctcatttccgtttacatagctctctgaaagaatcgcgtaaatcgagtaagatgtcgcatcttcggcaattacctcaccattgcgatcaaagattgtgccacgtttggcttttactacctcaccaccatgatataattcttcagttttaacctttaaagaggttccagctacgtgaccacctgctactacatagatcatgcgaacggcaaataaaaagaacaatccaatactcgtagcaaacaaaataacgcctacttttttgcgattgttcatcggagtcaaattcttttttcggatttttctttttagccttttaaagctcatttacttcactttccttaaattgtcgtcattgattgaaagtccagctttttcagcaatttctttcagacgatcagaacgagacaattcgctcttttcttgctgcaattgtgtcgctgttttttcttttgcatcaatgtcagtttgaatacttgtaatttcattttgtgttttgctgatttcattacgataattgaccatcacaaccgataagccaatcaacatcactaagaaggctaacacggcgaatttttctacccgcgtaattttttttaaacgatcaccaggagaaacgaagactttaaaagaatctggcgtttgatgaatttcttcttgctgagaatcaaattgaaacggttggttattttttaattctgccataattcctatcctttcttcattttctcagcgattcgcaattttgcacttctcgcgcgattattatcctgcaattcctcttcagaaggaataatgggttttctatttactaatttcaaaatcggttgaaaatcctctggtaccataggtaaaccaggaggcatatcctttggcgcactgaattctttaaatattgtttttacgatccgatcttctaacgagtgaaatgtgatgacactcactcttccaccaattgctagcatgtcgatcgcctgctctaaggaactttcaatcgctcctaattcatcattcacagcaatgcgaatggcttggaagacacgcttagcaggatgcccgccctttcgacgtgctggagctggaatagcctccttaatcaaatctactaattcaccagtagtttcaattggcttaacctcgcgcctacgctcaatcaaacgagcaatctgtttggagaatttctcctcgccatagcggaagaaaatttttactaattcatggtaagaatattcatttacaacttgataagcacttaatggtgcatcttgatccattcgcatatctaatggtgcatcttggtggtaactaaatccacgttccgcctcatccaattgaggtgaagaaactcctagatcgtataaaatcccatcaacttctgtcacaccaaagcgcttcagttcagctgtaagttctctaaagttagctttgacaaaggtcacttgtttttttgcgacatattcagctaaacgaattttcgcgttttcaattgccttttgatcttgatcaaaagcataaagatgtccatcattgtttaactgcctcagtaaatactcactgtgcccagccccacctaatgtacaatcaacataaacaccgtctggtttgattgctaaaccatcaactgtctcatgaagtaaaacggttgtatgttgaaagtctgtcattgataatcctcttctctaaaatccaaaatcgaccattgtttctgcaatgtcatcaaaactatcttcagtttcttttgtaaattcattccagcgtgcttgatcccatatttcgatccgattggcaacgccaatgatcacgcattctttctcaagtgaggcatgattacgtaaagacacggggatattgatccgtccttgcttgtcaatctcacactcagttgctgcggagtaaaagaaacgtacaaatgcacgcgcatctttcttagaaagtggcatctcattcaatttagtctctaattggttccattcgggtaatgtgtatccaaacaagcagccatccataccacgggtgactacaaatttctcgcctaattgttcacgtaattttgatggcacgatcaaacgacctttcgcatcaatattatgttgaaattcgcccatgaacatctagactccacccctttttaccaccgcatgagattagtctaccacaatcccccacaatctaccacactttgtaaaaaacaaaaataacacttttttgacctttactaaccattgcgttttttcaagggttttacggataatcaggagttttttaaaagtttttttagtttataatgcattaataacactgacaataatcaaaataaaatagactaaaaatgataataaaaaggttaagcgccaaaacattttaaagaagcgaccatacatgatttcgcgatagcgataggcttggaagacgactacgctaatacccaataatagaatagttaataaaaaatatggtaaaatcgaaaacgtgctaatactttttgatatttcgtgcattccgacaatcaaaaatggtatcgtaatgtctggtgtttttaaattgaagcgttgttttaatttgaaagttgtcacgatataatcagacgctaaaaagacgattatcgggaaaatgtaccataacaataaaattggtgaaaatgatgccaacaaatacagtccttcctcttcaaactactaccctcactatactgcattatcgttacattcgtgtttcaattcatttaaaatataaaggatttagcaagttttaacaattgaattcgcaatatcgacgcgaaaagatttcttagtattttttaaaagtttttttggttgattgcggagttttgaaaaatgaagtatgatgattttgaagtttttttgagggatggtgacatcatgaataacaaaaaatccacgagcacattttctaaagttactaaagttgttatttggactatgttaattttaacaattggatcattagttttgagtagtctgttaagtattatgtaagcaaatagccggagcatttgctccggctatttttttgctaactgtaatagttcctttgcatgtttaacagttaaatccgtaatttcagttcctgctaacatacgggcgatttcttctgtacggtcttgctcagttagctcctccactttagtcaatgttcgtccatctactacttctttgcgaataaacagctgatgatcagctttagcagctacttgaggcaaatgggtgatacaaagcgcttgagaattttgtccgatttgataaatcttgtctgcgatcgcctgagccactctaccactgacccccgtgtctacttcatcaaacacaatactggtcaacccttgtgtttttgagaaaatcgtcttcaacgccaacatgactcgtgagatttctccacctgatgccactttaactaacggcttcaatggttcaccaggattcgtcgtaataaagaattctacttcatcaatgccttcaggactaaatcctgcttctttaaaacgtacttcaaaacgggcattctccatataaagatccttcaactcagtttgaatagccgcttccagtttcttcgccatttcctgtcgagctgttcgcagcttttccgctaattttagcaatttactttctttaactgctaattccttttctagtttttccaatttatctccagaaaaatctgaatctagaagctcttggcttattcgctcgtaatagctcaaaatgctttctatcgaatcaccatatttgcgtttcaattgatgaatcaattccagtcgctcattaaccaaatctaaacgttcttcatcaagctctaacagatccagctggcgaccaatttcgctaacagcatcttgcaaaagatagtatgcgctatgcacattatcagaaatgttttcataatctttatctagagaggcaattgtttgcaattcttgactagctgacccaatagcgtcaagggaacttgtctcctcattcgtcattgcttgatagctataggaaagactgtcaacgattttttgataattggtgagtttgtcacgttcttccattagcttttcttcctcgcccagagttagttcagcgttaccgatttcttcttgctggaaggtcaacatatcgatccgttgaacaaaggactgctcgttttgcttaaatttcttaacctgtttggctaaggtaacatactctcggtaagcgatttggtaggtcgttttaatttcttgaaatgctgaatcaccaaaactatctaaaagacgtaaatgggattctggatgcatcagttcttgatggtcattttgtccttgaatatctactagaaattgtccgattctacgtagatttgcgagagttacgattctgccattgacacgtgacacactttttcctgaactattcaaatctcgctgaacaatcaatccagcctcatcaacctcaattccaagctcttccatcaattcttgaaagtccgattgttttggtaaatcaaaaagtccttcgactagacatttatcactgccttggcgaatatattcaatcgacgagcgagctcctgccagtaagctcactgcatcaattatgatcgattttccggctccagtttcacctgttaacgcagtcattccatcagtgaagctcaaatgtaacgaagaaatgatcgcaaaatttttaattgtcaattcctgtaacattctgcctattccccttttaatgagtcatactaattattttgacttttttcagcgatgtcttgcttaatacgtctagcgtcctcttctgtccgtgcaatcatcaaaacgccgtcatcatcattcaaagtcgtaaataaaacttttgtgaattgtttttctaataaatttgcacacgccgaagcatttccaggtaatgttttcacattaacaaatttctccatttgatcgacggatatcaccgcttcttttaataaatcagcaagtttttcgttcacatcttcttgttctttacgcggcatgctgtagcgataaccaccattttgtgctggtactttgatcagtttcatttccttaatatcacgtgagattgtggcctgtgttaccgtcactccttgttgtgcaaggatcgccacaaaatcttcttgtttctttacatcatattcacttagtaactgtgtgatgatacgatgccgttcttgttttcgcattccctctcctccagactacttatctaattgctgatgggcctctgagacaatatttgttagatcaatttttggatttaagctacctctttcgggcacttttttcaaatgggcaaggaattcgatattgccctcacctccagtaattggagagaacgttaattcttgcacattaaagccgtgagtcattgcgaaatcggtaatatcttctaataccatcaaatgtgtttttggatctttaatgatccctttttttccgacatattcttttcctgcctcaaattgaggtttaattagcgccacgacatcgccatcatcagtcaaaatgtcatgaagcggaggtaaaattaattttaaggagataaaggaaacatcaattgtcgcaaaattgggctgtccttcttcaaagtctgctaattttgaataacggaagtttgtccgttccatcaccactacgcgttcatcttgtcgcaatttccaagccaactgattgtagccgacatctagtgcataactcaatgcggcaccattttgtaatgctacatcggtgaagccgcccgttgaggaaccaatgtccagcagaattttctgattcatatcaacgtcaaaagtctttagtgctttttctaattttagtccgccacgagaaacatacgctaaactttgaccttttatttgtagaatggtttcaattgaaattttttcgcctggtttgtccaaacgttcatttttctggtcataaactaacccagccataacgccacgtttggccttttctctagtttcaaaaagaccttgattaaaagccaacacatcgacacgttcttttttcatagttatttcctacttcattatatttttattttgtaagtgcaaatagcccaagtaactcttggaaaattcgtggttgaaaatcagcggcctttgctaattgctgtacaactatttctgcttgcttcaattcatctgtcagtgccttttttgcaccttccaatccaagtaaagccggataagtacttttatctaatttctcatcttgacctactttttttcctagctccttggtagttccgacaacatctaacagatcatcgcgaatttggaaggccaaaccgatgtgattcccaagcttttcaagcagttcaatcacatattcggtttgattggctaaaatgccacctgcaacgaaagcataagttaaaagtgctccagtctttccacgatggatcgcctttaactcgtttagcgctacgtgttgtttctcggctgccatgtcgcctgcttgaccagctaccatcccgccgcttcctgcagcttttgccaaaagctggatcaacaaaacattctctgttggactcaaggtagtttcactaaccagttgaaaggcaccggtcaaaagtccatcaccagccaaaatcgctaaggcttcaccaaagactttatgattggtgggttttccacgtctcaaatcatcattatccatcgctggcaaatcatcatgaatcagtgagtaagtatgaatcatctctaatgctccggcggtttgataaaccgggactgttaactctttctgaaatgcctgaacagtcgctaacacaatcagcggccgaatccgtttcccgcctgctttaacggaataaagcatgctctttttcaactcttcatgtgcagtgctagtagtaatgaagtcaacgatctctttttcaacctttggtagctcttcagcagaaagctgctgcaacattaggcttcctcctcacctgtaaaaggcacttcttcatcttcactcatcattttagtcagtgttttttctgcttttgttaacgtatcttgacattgcttactcaaaaccattcctttttgaaacgcttctagtgcttcttctaaaggtacatcgccacgctctaactgcgtaacaatggtttctaattgcgtaattgattcttcaaaggttgtattttccattactcttctcctttttcaatttttaaaatcgcggctttaaccgtaccatcaacaaaatgaacggtcatctctttttcctgcaaatcatttactgaacgaacgacttgctcatcttgggtcgtataggtgaatccccgacccattgttttcaatggacttagtaaatccaatgaagtgatagcctgctgcactcgccgttgttgtttttccaaatagccttgcatttgctgctgcaaacgttcctgtagataggtcatttgctgttgagcctgtctgacacgattgatgggattagcttgggccaaacgattactatattgcattagttctcgttctcgctgattcaccaaaacagtcatgttttgttgtaattgttgcgttaagcgatccagttgtatactttgcgcttcatataaacggttaggctgtctaaaaatatatgattgctgcaaacgttcaaatcgttctttttttcgttgcaattgatgcaagaaggcctgttctaaacgtgcctgcttttctttaattcgcagaatttcctctgataaaacgggaactgctaattccgccgctgccgttggcgttgctgcacgcacatcagcaactaaatccgcaatcgttgtgtccgtctcatgccctacagaggaaataattggtattggcgaagctgcaatcgcccgcgccacactttcttcattgaaaggccacaaatcttcaatagaaccaccgccacgaccgatgatcatcgtatcaaaatccattgcttcggcttttttgatatttttaacaatatcagccgccgctttgtccccttgtactagagttgggaaaagaaccaactgagtaattgggtatcggcgtttgacagtcgtaatgatatcgcgaatgactgcaccacttggactagtgatcaccgcgattcgtttcggataacgcggcaaagttttctttggctgtgagaacaatccttctttgtttaatttttctcgtagttctgctaaagcttggtatagtgcgccaacaccatcaggctccatgtggtcaatatatatttgataattaccgctggcttcatacaatgccacacgaccgactaccagcactttcatgccttcctttggtgtgaatttcagtttttgaaaagctcctttgaacatgattgcactgattttggaacgctcatcttttaaactgaaatattgatgactatttgcccgcatgcgaaagttggaaatttctccggtcaaatagacccgctctaaataggggtctacgtcgaattttcgtttgatgtatttgtttaatgcactgacagttaaatactcttgtgccatttgaacacctctttgctattcgtgatctaatacttggcgttcgcagcattccacggtttgctgcatcagcatcgtaatggtcataggaccgacaccgccagggacaggtgtaatgtagctagcaattggctcgacttcatcaaatttcacatcgccaatcagctttccatcctcatttcgattcataccgacatcgataacgacagctcctggtttgatgaattctttcgttacaaaatggcctctgccaattgctacaaccagaatatctgctttactagcaactttggctaagtcttctgttttagaatgtgtcagagtcactgttgaatctgcacctaaaagtaagattgccattggtttgcccacgatgttgctgcgaccgatcaccactgcttgtttaccggctaatgggatattgtattcttcaaacattttcatgataccatacggggtgcaaggaattgtgtgaggcattccagcaaatagacgtcccatgttcattggatggaatccgtcaacatcctttaacggattgattgccatcaaaactttctcttcatcaatgtgttctggtaagggcaattgaaccaaaatgccatggaattcagttgattggttaaagtagttgatttctttgatcagctctgcttcggtgatggtttctggatattttttgacttcagaatgtataccgattttctttgctgcacgttctttgtttctaacatagatttgactagcggggttttcgccgactaataacacgactaaccctggatggataccctttgctgctaatgtttcaacttgctgtgctgtctcctgttgaagcttttctgccaattctttaccattaataagttgtgccacgttcattccccgcttctttcttttctatagtttaaatgaagctgggaaaaatagctctattagctatttgccccagcttcatcgatctctttcattacattagataagattccattaacgaactttcttgattgatcatcgctgaaagttttggctaactcgatggcttcatttagaaccactcggttaggtacttgcgtgttgtataacatctcataaatacctagtcgcaagataatcaaatccattttagcaattcgttgaatcgaccagttagaacgtaaatgcttttgaataattttatctagttctgcttgatgttcaacgactccgccaactaattcatcaagatagactggaacaaatgcgtcttcatcttcactgacaatctcttgttggtcaatacttaatgcatggttgatggcgtctttttttgttaattcttgattaaaatccaacggaaacagtgcctgcaaggccttttctcgaatctcgtgacgtgataattctttactcattattttcctcttcatcattgaatagttcttctaaagttggttgctctagtttttcagctacaacgccgactacgtggatatttacttcacttaaggcaacatctgtcataaataaaacttgctgtttcacgcgctcttgcatggccatagccactttaggtaccgaagtgccatagtcaaaataagaataaatatcgactttcaatccgtcttcgtcatttttgagataaacacctttaccgtgagctgctttaccaagtaattctgtcacattgctagctaatgagccgcgcatgccgtaaactccgtcaactttagaagccgcaatcccgataattacttcgattacttctggtgcaatgataatttccccaagttccgggctctcgcctaaaactaaattcttttcatctgccatcttactctctccttactcctgctaaatgtaattatttttcttaccagaaaaataagtctgatgttcgtaccgtatatcattctgttaaactgttccattttggctttatttttgaatggcaagtatgttttcctgttttttgatactgcgaaaaacagaactgacacccttactcctgctaaatgtaattatttttcttaccagtataacagaatgatattcgtgccgtatatcattctgttatactggtttattctttgctctatttttgaatggcaagtatgttttcctgttttttggttctgcgaaaaacagaactgacacccttactctttattatgcattatgctctggaagcgtagctgccatcttgtgtattaatgatcagtttgtctccttgatttacgaagaatggtacattgacggtcaggccagtttccatcacagcaggctttgaaccgcctgatgaggtatcccctttgatatttggttctgtttctgcaacttccaatactacggtatttggcagatcaacacctaaaacttcattaccatacataatgacggtcaattccgtattttctaatacataaagcatttcttctgctacttgttgttttggcatttcaatttgttcatagctttgcatatccatgaagacatagttatctccgtcatcataaagatactgcatttttttattatcaatttgagcttttgctactttttcaccagcgcggaaggttttttcttgaactgctcccgtacgtagatttttaagtttcgaacgaacgaaggccgcacctttacctggctttacatgttgaaaatcgactacgcgccaaatgccgccgtccacctcgatcgttaagccagttttaaaatcgtttactgaaatcatgatacttcctcctaattcaatctctgcagatttggttctagtttatcatttcttgtttacttacgctaccactactcaataagacttataaaatgatgagctcttttggcgaccgcgtcaaaattcgatttccttcagctaaaatcaccaagtcatcctcaattcgaacaccgcctaacccagctaaatagattcctggctcatcagtaataatattccccacattcaacggtgtatcatttgaacgactgatattcggaccctcatgaatctccataccgatcccatgacctgtagaatgtccaaaggcttctccataaccagcttcagtaatgaaatcacgagcaaccccatctaactgtgctccggtcacaccagcttgtgctacctcaatgacttttaattgtgcttccaaaacgatttgataaatctccttcaattgttgaccaggatcgccaatcgcaaatgtccgtgtaatatctgaaacatagccttgatagacgcatccaaaatcaagcgtgattaaatctccttgttcgatcattttttcgctggcaatgccatgtggcaaagcagaacgaacaccgctagccacaatcgtatcaaacgatgtgcccgttgccccaagtgaacgcatgaagaaatccaactgattagcaacttcaatttcagtcatgcccggacggatcattttcaagacatgctcgaagccttcatcagcaatagcgcaggccttttcaataatggcaatctctccatcatctttttgttctcgcagtttctcaatcataccactagctggagccagctccgcgtcaatcacttcttcaaaaatagaatactctgcgtaagtcatggatgcatcctcaaagccaagcacattgatgccttcactttccatcaatttgataatctcatcaacaatattaccttgctgttggataatcgtcattccttgcacctgttcacttgcttgttcagtgtaacgaaaatcagtaataaagaacgctttttctaatgtaatcaaagctaacccagcagttccggtaaaattagtcagataacgaagattcgctggacttgttactaagtacgcgtcaatgatctcttttttcatcagtgctcgtaatttctcaatccgttttatcattattatcacccatcattcattatagcaaagagtttcgaaaagctgaacgaacacgactagaaaaagaaaaagcaatgaatacacaaaaaaacagaagtcacactctcaacttctgtttctttaatcatcgccgtccggtaaaaaatgaaacaaccgccacaacaactactgcacctaaaatcgatggtactaatgccatcccagctaaatgtggtccccagtgtccaaatattgcttgtccaatataagagcccgccaaacctgcaataatattgaaaatgcatcccatttgtttaccgcgtccagaaagactaccaccgattgcgccaatgatagcaccaacaattaatgtccaaatcatcattatctctcctcatctgttctattcgaaattatataatcacttaatagtagctgatccttactgtatatcttactagcaaactaacaaaaatttttctctaagtatatcggtcgatagttttattcatttgataaagggctaatataaatatctgtttcagtgattcagatacttatctcaattgtcaagagttaaatagcgctttttccagaaagtttctcaattgtgaaacgcaaataaaggttggtataaaagcattttactctttgtaagcggctaaaacagactttgaaaatgcttttcttgacaatcctgtgaataactttttattgaatcagatctgaccgcagcttcacactattttgctcccaatttactgcacctaagcgataaggaaaagcacctagcaaggaaaagcttccaacttctggtacgttgatcttattcatacgagcgctccctttagctaaatagcctgttcccattttcagcatatcttttaaattgagattgctgccggagtattctttgactgtcccataattatttgtaatggaagatagccgtgggcgaactgttttgcgtttcatcaagcgaatgatatcctcttggcgttcaaacacatcaattcgaccatcctgatcaatctgataactaatgtacgcatcaatctcatcgagcgtcagccgatgatctcccttcgtaaatttctgtccatttttcaaagcgatgaaatctttataaattgttactgccatcttaccatcttcttcaagcccggcttccttcactcctaataaactatcggtcttttttaagattaaatatttttttacttctatagaaaaggctacggaaaaatagcctagaaatttttcgatcggtacttgggtatacaattctcccaacgtcagtttttgaatctttatttcaggtgagactcgtaaaaggctgttcacaccgctcgttaaatcgtaaacaaaaaaactggaatattccctatcctcaaacacaaacaaaactttcatgacgatcttcctttctaaaacaagtgtataaaagatctaaaagaaaatcatccgtcgaaagactgaggtttaaatagaaaaaactttcgataagtcgctatcgaaagttttttctattaatctaaatattgtgtatcattgattttcgctactgaatagttattatctttatatttcaaagtcgtaacactgcaattatcgatagcctcaccttgatattcaccaggaaccaacatttctagtagtgttggaatcatgctgccagatgatacgatcaagacattcttcgccttcttctttttcgcatcggcaactactttgtccatagcagcttgccctcttttagtgatatctttataactttctgcgactttcaacggatcgctctcagcaatagcatctgctaccccttcatcacctagtttattaaccagcttgtcataatctgtccaatcctcatcgaacttcaaatcgttcgcttcaaaaattggtgtccacatctcagcgttcgtttttccttcaaaaccgccgtaattccattctttgaatccatcgtgttctgaaagcttaggcgtcttcttctcgttctcagccaggattaatttggcagtatttctttggcgtcccaaatcactggaataggctaagtcaaacttcgtatctttcaatcccttacccacttgttttgcttgtgtaattcctttatctgttaaaggtgaatcggcgaatccttgaacttgtcccgttgtattgaaaaaagttttcccatgacgaaccagataaatggtcacttccgcttttttctcggaatttttttcttttgcttgtactgaaacaccacccgttaaactaagccctaataagaaaacaaacaataatccccaaatttttttcattttatagatcctccccgttacttttaatgacttttttataccaatcaaaagaatcttttttcagccgttgcaaactcccctgaccttcgttgtctaaatcaacataaataaaaccgtatcgtttactcatttcaccagttgtcgcactgactaaatcaattggtccccaagtcaagtaacccatgcattctacgaagtcttcttctactgcctgcttcactgctttaatgtgtttttctaaatattcgatacgatagtcatcatgaacggttccgtctgctagttgatcgatcgcccccagcccgttttcagtaatcaggattggcaactcgtactttcggtataaatagttcatgacatagcgaatacctgttggatcaattccccagccccatttagattgttctagatatggattttgaagacctccgaataaagctgactcgccctctaccggacggtttggttcagacagactagacatgtaataatttaagccaataaaatcaatcgttcctttagcaaaatcttcaacatcttctggttgatttcctaaatcgagtgctaatgcttgatattgtttcattttgtatttaggaaacttaccattacacatggcatcgacttgataataatcccgatcattgtctaaaaaggccttcaatacattatctgggtggcagtcataggaatagattggattcaagccgaagacacagccgattttattttcaggattgagttctcgtccaagtctaactgccttcactgcagctaatgtcatgttatagccaattttggctaactcttctactgagttttccatttcgctgtattttaaacccgcaatcaaataagtgaaaatatccgattgttcggactgtgggtcaatatgattcatctcattgaaagtcacccaatatttcactttgccatcatatgctcgcatgaccgtttcacaataatgtagataaaaatcaattacctgtcgatttttccatgagccatactctcgaactaaatggatgggtaattcgaaatgataaagggtcacgattggctcgatcccattagcgagcaactcatcaattaccttgtcataaaaatccaatcccgcttgatttggctcctgctcatctcctttaggaaaaattcgcgaccaatcaatcgagatccgtagtactgtgaaccccatttctttaaacagtttaatatcctcttggtaatgatgataaaaatcaattcctagatgtgaaggatagtccaacgttggatcgattgtctccgtgatcactcgtggttctttgtttgatcctttcgtaacaaagtccatgattgctggaccttttccatcttcttgccaagccccttcacattgatgagcggcaatactgccgccccataaaaagtcatttgtaaatgtcatttgcttctccttttttacaaaattactgttagtaattcatcatcttgttcattactggttgaaatcacatcaagataatcatttgaatttgttaccaccacaatgattactggatcaaaaccggcttcttttactttttcagcttgatatttcgctaaaatgtcaccttttttgacttcctgtcctttttctacgaagctttcgaaatatttaccttttagatttactgtgtcaacaccaatatggatcaataactcaacaccatttttcgttttaatgccatacgcatgtttggttggaaatgcaactgtcacagttccttcgactggtgaaataatcgactcctctgcttgagctggtatgattccaacaccctttcctaacgctccagaggcaaatgctttatcactaatttcgcttaatggaactacatctccttcagcaatttttccaatacaaacttgtttcaatccttggttactctctaatgcttcaacaaattctttttcttcaagttcttcttcggattcttctttaggaatgccgataccatacgccacagctgtagcaccaacaaagccaaccacgacactaataatcatccaaataaagttacttgttccgcctgctagataagtcggtaatgaggctaatccccaaacaaatcccattgttttcacaccggctaaccctgcaatcaatccgcctaatccaccaccaataataaccgctaaaaatggtcgacgatatttaacaaaaaccccaaatacagctggttcagtaatacccattaaagcactaaaactgaccgtaccgaacatttggcgctgatgacctttttttgcacgtaagaagtagccaaacattgcaccacaaactgccacatcagaaattgttgccgcatgcatgattattggatcgtagccaattgttcccaaaaagttcaatacaattggataagtaaaattggcagctcctaaaacaatcaagaatggttggaaggccgcatacaagacaactacaatccagttgccaatcgtattcattaacacatcaaagaaggcacttacgccatcaccgatcaatgttccaatcgggccaaagacgactaaaataactggaaaggttaataccagtgataatgccggaactaagaaatactgcaacccgcttggaatgattttcttcaagtattttgtcacgacactcaagaaccaaacacccaacaagattggaataaaggtattcgcgtaaccgatcgttggtagatgataaccgaacaattccaaaccttttgccccatcaatattggtggaaagtagtccgactgctaatgccattgctacatattcattcaatttcattcgtttagctgctgatgctgcaataaagactggtaagaagtggaaaaccccgccacgcagcgtatcaaaaatcatgtatgttggactgtctttagaaactaatcctgttaatgaaatgattgccatgatccctgcgatcattccggctgcaagtaaaacttcaataatagaagtcatggtttcagatatcatgactaagattgatgaggcgattcctcgaactcctttggcctttggcttttcaatttcctccccgtcaggcttcaatcccagcattagcatgaactcattgtacacatccgtaacatgtgttccgacgataatttgataggcaacctcattggagacgacatcaatcacaccatccaaatttttgatttcttcagtttttgctaaactgcgatcctttaatgttaaacgcaggcgggtcacacagtgagcgactgctttgatattatctttaccgccgactaattcgatcagctgtttatttaatttttcataactcattttttgtcctccattctttctgttacacgatttatgtgaagcattaaataggtttcttcattgattgaaatctctagattaaattgtgactgtacatagattttcattttctggacagttttaaacgattctggatacaattggcaaacttgtttataaagctccaaggtttctgatccatcattgaatatttctccgttaacgattcgctgcacaaagtattgtaaatgagtagtgaagcgcatataattcgttgattcgtcatctaacgtcacattaaaatgatgttccacaatcgatactaggtcacttaacgctcgcatctctaaaacatggtcttttcggctatcgcgactttcttccatatttacaaagtgcaaacataaagacacggcttcatcttcaggaagctgcaagcccttctgttcttcaatcatttttaacgccttaagtccgaccttaaaatgttctgggtaaaaacgctttgtatcccatattagcggacttttgataaactgctgtttctctacacgtttcaataggaactccaagtggtcaagaagagccaaactcaaataatcacttgccttaatgtttaattgttcctctccataggaaataatattgctgatcaaaagaatatcgtttggatctgaatgagccaataaatagctgaaatgatccagcatatcaaaggaatcaagaatatacattttctcaacttcctcttctgcgatctgctgtccctttttctttttgaaaccaattccttttgcaacgacgaagacctcgtttcctcctcgtttcactaatgcaacgttattatttaagatttggctgatcttcatacttcctcctttccagaaaaaaaacccaagaaagtatacagcgggaccttggtctccagctatgctttcttgagttctgcctgatcatcttcagtaacatactcacaatcatgactccggcgccatgatcggtcttttctcttaattttttataacttcattctaagtgataaaaatatgaatgtcaacgctttctcgaaatattcatttttatatgttttcaccttcgttttccactatcctaaatccccttgttatttaactgtttatgacaccctataataaataggactattagcaaaaataggaatcaatggtacaatgaacacggagaaaaccaatgaataaaaaataactaaccaaaaaatccttaacagaaaggatcacattatgaatactatcagctatgttgttttggcgatgcttgttcgtgcgccattgactggttatgaattgaaacgttttttgaatcttttttgggaggctcatcatagtcaaatttatcctaccttaaaagaattgcgcaaacaggaattaatcgaaattgtcgatattcccgatggcaaacgtaaaatctatgatattactccggcaggaaaagaagtggtaaaaaactgggtcttcactaaaagccacgctccctctcaaaaagatgaattcttagcaaaagtattcaccatttctgcattagaccgtgatacatcaaaattcttgattatggaacgaaagcaatacttcaatgaacaattaaaagagtattcgacagttttaaacagcttgagcgagctaactaaagaggaacgccgtaaaaatttcggtcgtgaattgattattgaacggaagattcgtctatgcaaagaggaactgtcttggtgtgagtgggcagaagaaaaaatcgacgcctatttttctgaataagtttaaagcagatctcttgaggtctgtttttttggcaaaaataattgtaaatatatttatgtaaatattgacataaaatccttttgtgattaaactgttgaatggaaagtggtgacttaatggaaaatttaaacgaaaacaatgacagtatagttacggagaaagaaaatggtaaagcagcgtatgtcgttgcctttgcctgcatgatcgccttcatggggatcggattggttgatccaattttgaattcgatcgccaaatcattacaagcaacgcctgcgcaaacaaccttattatttaccagttacatgatggtgaccggcattgtgatgctgtttactggttttgtttccagtcggattggtactaagaaaaccttgatgttgggtttagctattattattatatttgctttgttcgccggtttgtccaatacgatcgatgcattgatttattttcgtgcaggctggggtttgggaaacgccttattcatttcaactgccttgtctgcaatcgtcagtgtgctaattaggcaaacggaaaaatcaatcatgctgtatgaagcggcaatgggacttggtatgtcgattgggcctttagttggtggttcgctaggctcgatttcttggcgcttgccgtttgcgggtgtatcggttttaatgctgatttcattcttatcaatcttgattatgtttaaggaatccaagggaaaaaaagaaaaagttgacttttttgctggtgtcaacgccttaaaaaatcataagctacgctctgtaggcttgattgccctattgtataatttcggcttttttactttgcttgcctatgcgccctttttaatgccgaatttttctgaaatggaaattggtatgaccttctttggctggggaattttattggctatttcttcgatttttttagccactcgatttgaacaaaaaatcggaacattctataccttgatgatcgggtttatcggttttgttgtctgcctgctgctgatgggaatcaatgccgaccaaccctcactagtggctgctgcgttgattgtcgctggttttttccaaggaataatcaacaccttgatgacaacgattgcgatggaaattcctgggatcaaacgaaacatcgcttcatcaacttacagcttcgtccgcttttttggcggctcactcgccccttttgtcgccggtttaattggtgcaaaattcggcagtaattataccttctactttgcaagtgcgatggttttcatcggtatcatcttagtggttgttcattcacgctattttgaaactaaagaagaagagaacctgtaactgaaataagcccgtaccttgtaaaattacaacgtacgggcttttcatctaccatcagactagcaaaaaaaaacgtccaataattgattttataacgatgcaaccagcaattacaaatagcgcattttttggatcttggataaatggtatctgccagttaaataactgaaccaccgtagtaaaaagtgccatgacaccaaaaatataccccataattgttaaaggatgtgcgggcgcattactgataaacttgccaatcgtcggcatgaccatgcacatggtaaatccgattaaacctaacataatcaccgctgaccttggtccgtcaataaaaaacagtttccttccacataatcctgcataaacgatcattcctgtaacaacccattccgctaccagtatcccaattcccttcatcattgatcactcctcagatagattttattaaattgggtgatgtgcttttctaaaaaggtcaatgcttcttcatacttttcgggctgattatcgtatttggttaacagtaaatacaaaggcgaataaaattgtaacgccatgacttcaggatcagcatccaaatagactttttctgctattaattgagaaaacacctgtgtaatatactttaatccattgttaattacgagttcgcgaaaaaaactgcttatttcagaactacgatactgttcgattgtcagcattctacgcaattgtgagccatactctgtttctaaataaaattgaaacattgtaaaactcatctgaatcaattcttcacggacaccctttgcatttaagagaccatccagtctttttgaagcgccaatctcggcagtttcctcttgatagcgctgctcaatgtctaaaatgattgcgtcaaaaattgcttgctttccgctgtaatgtctatagattgcactttctcgtatcccaatttcctttgcaatatctcgaatcccaacaccatcaaaccctttttcagaaaactgttttaaggccacctgtaaaataagctttttagtatctcgcgctgcttttcttggcatagtcatccctccgcaaataagttaacaactgttcactaaaattatagtgaacagttgttaacttgtcaaatgcacttaaaaaagatgttgggaaatttgatttgctggttattaacagtgaaattctcatggttatcttgagaatgcattctaatattacagtgattgctgatgaagctgcggcaaagctgattaattaagtaattccacagaaaaagagagacgatcatgcctctcttttttctatctttattagtctaataaacttgctgcttcacgatctaaaatcaccgttagattcggatgcaagcgcaaaactgacgcgggaacatcttctgtaattggtccttccaacgcctgtttgataattgcggccttcttctcgccattagcgatcagaaccaattcttttgctgctaaaaccgtttgagcgccaaatgtcaccatttcttctcctggttcatggggacttgattcatcaatcagcttatatagctcatcatcctgctcgattggtacccgataaacaccgaaatcaaaggaggtgaaatctggcagattgccacagaagtgaccgtctccaccgatgcccatcaaaaccaaatccaagccgccatcttcagcgatttgtcgatcgtagtcctgataattttggacatctaacacttcaatattttcttcttcaattcctaacggctcgaataattccttcgttaaggcctgcatcgtcattccgtattcttgaccctttaaggtaatttcatcaaaattgtaaaaatgcgccaagctttgatcaaaagacacctgcttcaatcgttcagctaagatttcatacgcacgcttaggtgaagagcccgcagtcagcgccagattcacgcggcgactttccgcccacttcatcaaaacgatgtccgccgtgatttgacttaatgtttcataatcctctgttactaataatttcatttcaacacctgcccttttcttttaatgatagcatatctttttgaaaggggttccgttttttattaactaggaatcttttccttggccggcatctgtaaaatacaattttgcggacagatttcgacacattcaccgcagtcaatgcacatatctggatcaattaccgcaacattattttccatcttaatggctttttgcggacatgtcttcacacaccgattacaggtgatacagcccacatcacagttttttcgcacaccaccgcctttatcctgattggagcaagcgaccaatgcggtattttctgcgggtagcatcttgatcagatttttcggacaggccgtgatacattttaaacaaccgacacacttatccggatcaacctttgctactccatcgacgatgtgcagcgcatcatagtcgcaaacagcagcacaatcgccaaagcccatacagccaaaacggcaatcttgcggaccgccaaaaatttggttggcgccgtagcaggtctccgttccggcataagccatttttttatttgtaaactcacaggtgccattacagcgaacaaaggcagcaaccttctgaacatccccaacttcaaggcctaatatctctgccaaggcttgttgagtagatgggccacctggcgtacagttggtggctcctgcttctcctttagccatcgctttagcataaccatcgcagccggaaaagccacaagccccacagttgattcccggaagcgcttctcgcaaggcttcttccttttcatccaccggtttatggaagatgatggttgccagggaaagaatgactcctgcgattaatcccatcccgctaacaatgccgatgggtatcatgatttctgtcattatttccacctcctactggaataatccttctgccaaaccggcaaatccaagaaacgacaacgatacgatagcggcggcaatcaatgtgattggcagacctttaagcgactcgggaatatcatttccttccaagcggccgcgtaccccggcaaaaattaccattgcgactaaaaaaccgattcctgcggcaaatgaattcaccattgattgcacgaaggaataatttttcgaaaaattcaggattgttacaccaagcactgcacagttcgtagtgattaagggtaaataaatccctaacgcgttataaagcggagtcatataccgtttcatcaccacttctactagctgcacaagtgcggcgatcgttaagataaagacaatcgtctgtaggtaatccagccccatcggtactaataccgaagcgtacagcggataggttactaaggtcgctaataccataacaaaggtaaccgcgagagacatgccgacagccgtgtccaatttcttcgatactcccaaaaatggacaaattcctagaaactgtgacaagacaaaattatccgttaaaataccggcaactaaaatcgttacaaaaatctgcatcactgatcacccgccttttcatcacaaaccgtggtacaggcttcagcgaccggacaagcactacaatcgatttctttcgtcttgcgatcactcagtttattcgccaacatcaccagcataccgaagacgaagaacccgcctggcggcagcagcatgatcgtcattggtggaatcacacctgccgtaatcgaaaaccctaataaggttccgctgccaagcagctcgcgaataccgcccatacatatcaacgccattgtaaagccgacacccattcctaatccatctaaagcggaatgaagcactgtattatttttggcataagcctctgcacgccctagaataatacagttcactacgattaagggtagataaatccctaaagtagcatctaaggcaggggccaacgccttcaccactaattgaacaactgttacaaagcccgcgatgatggtgataaaggctggaattctgacacgatcaggaatcacctttcgcaatagggaaattacgacattcgagcctaaaagaacgaccgttgccgctattcccattcctaaaccattcattgcagaggtcgtcaccgctaacgtcggacaggtccctaacatcagacgcaggacaggattttctttgatcaaccctctgctgaaaatagtggctgctttttctttttccattgcttctcctccctatttctctgacgtagcgacttgttcaaacagagcaagtgcctctttgactgatgtagcaacggcattggaggatttggttgctcctgttaccgcttctacttgattcttattcgcaggatcattcttcactacctccagcgtgtcatcggtaccgtcgaactgatcgataaactcttttctcgtgacattttgaccaagtcccggagtttcgttagaggcatccagcacatcgacaccgatgactttgccatccatcactgcactcatgacactcacgtcactgccgtagccataggcctttgtcacgaaaagataaccgacagtcttgccaccactatccagcgctttgtagccttgattgtcccctgctactttgacttcttgaaagtcatcagccttaatcagctggctcatgacactttgagtttgctcccattcttgcttggcaattcggtctttaaaaacagaacgtgttccagctactgcaaaggtgatcactagacagatgatgaatagacataacgcatcggtaaaaatgactttggaactggatcgcttcattttaccttcgcctcctcaccaaagacttttggaatcgtcaaattctcaatatgagggactaaaatattcattaataaaatggcataagaaaccccttctggcagtgccgcgaagaaacgaattaagacggtaataatcccgcagccgataccaaaaataatcttgccatttctggtaatcggtgaagttgtataatccgtcgccataaaaattgctcccagcaataatccgcctgacatcatttgatataacggatctccgcctaataaggtagaaaaaatgaccactgttccgataaaacaaagcggaataatcggtgaaatcacctttcttactaccaagtaggcgccgccgagcagcaaggctaaagcacaggtctcacctagacttcccgcgcgtataccaaaaaacatatccaataacgagggaatcttctgacctgtctgagaggctgaaaaataagtcgccgatgaaatgacgtctggtcggaacatataatagttcagcggcggctgccaggtactcatttgggaagcaaaggacatcattaaaataatccgcgcagtgatcgcgggattcacgaagttttgaccaactccgccgaaaaattcttttacgatcacgattgcaatcacaccacctaaaatagccatccaaaatggcaaggtcaccggcagattcaaggctaataagattcctgtgacaactgctgtcaaattgtgaatcgaatctggccgctttaagattttccgagtgacatactcactgatgacacacgccgcaaccgttacaataatcaagataagcgcacgaaagccaaagataatcgtggaggcaatcacagccgggatcaaggcgatgatcacgtcctgcatgattcctcggctgctccgtccagagtgcagatggggtgaaatggaaacaggtaatttgttcatttggcagcctccctttctaactgtttcgctcgtttcattgactgaacgagtcttcggccagccggacaaacgaaggcacagcagccacattccatacaggcggagacattcaattttttcaagcctgcaaggtcattattatgagtacaacgttcgatttgtacaggcaacagcgacatcggacaagcctccacacagcgtccgcagcggatacatggtgattcctccggcagttgttgtgcagctcctaaaattgtgatggcattggtttgcttcgtgattggcaaatcgacagaaaattgggcaattcccatcattggtccacctaaaataatcttgctaggttcatcgatcaatccgccacaatagtcaattacttcgccgattgatgtccccactggaaccaccacatttttgggctgcgccacattgccatccacagtaatccgcttatgggtcagcggcatgccgatctcgatatagcgttgcaacagtgagatggtcgaaatattcatgattaagcatccaacctcagacggcaatttccctggtggaatttttcgtccagtggtggcgtaaactagcattttttccgctccttgcgggtataatgatggaatctccatcacatcaatcgatggatcacgatcagctaactcattcaagtgatctcgcagccttcttaacccttttggcttattactctcaatgccgataacaccatgagcgatattcaggtacttcatcaccagctgcattcctgcaataatccgttccggatactccaaactttcgcggtaatccgatgtaatgaagggttcacattctgccccgttaatcaccagcgtatcaatcggtgtgctctcattaacattcagctttacgtgcataggaaatccggcgccgccaataccaacaatgccgctatctcgtgctgccttcaaaagatcctcctttgactggatctccaccggcttgggttccggaaattccacaggcaacccatcacttgcgatatgaatcgcgtcacacatctgaccattcgccatcaaaaccggtttgattccctttacctttccagaaacagaggcatggatcggagctgagacaaaggcttccgaatccgcgattacctgtccgactgtgacaacgtccccttttttaaccgtcggcgtacaaacacctccaatgtgctgctgcattggaatggtcacaattttcggcgggtccataaaaacgctttcaaattctgccgtatttttattatgggggactttgacacctcctttaaactttgcgattgctttcgttaatgttcccatagacaaacctcccctgtggtccaacaaaatcattgggcttactcctcattttgcaacatttcatacaccagcaggcttattcttaccccaaataaataatagaagaaaaatgccgaaacagtgaagctgaacctgtagctggcttggttttaaacgttcatttgtttaatccgaaaatttttttcacaaaatgattcacaaacttcagtatcgattttatcagtatacttatacgtttatgatagcacagtgaaaaacaaatgtaattagttttcacaaactcacaaaaaaaaagcgcctaatttcttaggcacttttaatcgcttatcacttatggtgtattggaaatggtccactgcagagtggtttgataagttcccgtttgttttggggtatttttaggaacaaaaagctgaaactgattcagcggcatctcaaaatagccggaatccgtagtggcgctcaaagaaaataaggtcacttgattgctggggagcatatggactgtctgatttgaaatgtaaaaataattttgaaagttgctatttactccacctaagacgatatctagccgagcattagctaaattcttctgcccgcttacccaagaatttgtttgcgcaagtttcagctgccaggcttttgctgtagtacgagtatcatcaattcggatcgttcctgtttgcagcggattagcgctactcccaccgatataggcattccatgtttcatcaactttcgtttgaaccggatgactgccgaagttcaaactgcttggcagtaattcattcttcatcgtcaggcttccagcggcgaaataaagatttgtattaccgccatagttgcttaacagctggacatcaaaattatctgtttgaaaaattccgccccgtacaacagccgtaaaatcttgtgtcaatcctgtggggctagagaccaatgtcggaaacgaaacgctcgttgaccctaaaatggaagccgctactaaatttttgctaactgtcgaattcgcattgccaagggtactaatcgtattcgtcaaagcagttaagaggttatttaagactacattgattaaaggtagaggagtgattccctgaacgatcgcttgtatggcctgtaaacgtatgatcaacgcgttcgttataattggcagcagtccttggctaatacccgctcttaatagagtcgacgaatactgctctaccggagataggaatacctgacgtccgaagtcttccttattcaatgccgtaaccgtactgttaagatttgtcaccagcgtacccaatcccaaggttgtcagtaatccggtcaatgatgttaccaaatccaaaaccgttcctgttacagccttgatatcagaagccagtaccgtgactgtggtatctacagtggcatttccatctttttgaaccttaccagctaattgcgccggtacattgacaaatacatacttcgcacctgtccttcccgccgtcgcgcctattgctgttgttccatttatcgtaaaagtcacgggcttattcgcaacatttaaatagggtgctgctgaagtagtcccgctgttgttgctcacttgtgtatttgaaaatagatccaatgacaccgcactcacaatgatatttgaactggttaaaaatagaaaaatagctagtcctgtaagccaacatttatgaatcaaacgaagccgctttttcgtcattttatctccccctttattctcacttggattgctcccttcaaaaatttccttcgcgagaaaataatcgatgacaggtaaaaattgatcatttatttgtttttaattgccatgctttcttagataatccaataaaaaagccctttatttctataccttctcccttaattaaagctggtatatcaaaaagtgaaaaatattttgcttaactgtgaaaattctgtgagcaatcttatagcgttattttctaataagcttatataattccgacataagaaatattttcttttctgcgcagaaaagagccactacatttttccaaagaaagggggagacaattgaagacacagattggaatcctcttggtttttctgtcactcttcgttgtcccttctccaacgagcgaagcggccgttaccaacggaaaggttcagtactattacgaaagcagtacggctgctagtgacagttccaccgcaagctctcagaacagtactagcgtaacaagcaacagcacgactgatgttgataatcataaagaaacacctgcttcatccagtaatcgaagtagcatgcagcactcaggcattacccgatttatgcaaacaaatgatcaacggaatatctttttagtcattattggattactgatcctcgcaatcgcttttttagggtggcgaatcgtcaaaaataggaggaaaaacgaatgaaaaaacaagcagccttattcattgccgcgctttttgccggtagcctatttacctttgcaacaggcgctcacgctgccgacaccaccggtaccgttgactatacatctggcggcatcacttttgatccgcaaatacccggtgacccaagtgcggctctgcctacaaacttgaactttggttcgcacccaatccaaacaacacaagcagaaacttggacagctacctctgatggcgaacaagcttctccagtaacaactggacaagttgctgtcagcgataatcgcggggcagctggtagcggctggtctgtaaaggtcgctcagccaacacaattcacggctgggcaaagcgaactttctggagcgatcctatcctttactgtcggagctcttaccaacaacgtgaactcgctaccgacaggtgatggaatcgccaataacagcacggttgacttagttcttggtcaaacaaactccgtcatcactgcacaagccaatcaaggggccggcgaaactgctttgccgatcaataaatttaccttgaatgtaccagccaatacggcaaagacagcggcccaataccaaacaacagtcgtatggaccttctcatcaacaccaagctaaaaactcgggcagaatcccgactgcagccacgcctactgtgaaggcgatcccaggctgtagaccatgattctgccctttgattgataaataaaggggaaagaaacgattgagagagactcttccattacgcggaaaatacaattgaaggagacaaaaaatgttaaagcagcccatttcattgattcgaggactgttcctcgtactagccttttcatttttaccagttgtcgctcatggagagtcattggatagctttgatgcggtgattcacccatcagagcatcaaatcggaaaagaacagctttactacgatttacagtaccaaccaaatgaaaccgagcgactaacagttaccttaactaatcggacagagcagccgatcaagttgaaggccgcctttaatcgtgcggtcactaatagtctgggtgtcgttgaatactccgggatgaatgaagatgagagtgatttcggtcccaatatcaacgactacgtcaagctcagtgatcgagctattgatttagcaccaaaggaatcaaaggatattcatttggatgtaaagatgccagacaaagaatttgagggagtcttagctggcggcctttacatcgaacaaatttcaaccgaaaaagtcgaaggcaatatcaaaaatgtgttttcacgagagatcgccgtcctactgcaaaataagacggacgaagtaaaaccagatttgaaaatcgcccaagcaaatgcccttcaggtcaatcaccgcaatgcagtgaccgtgactgttgacaatgaaaaatcaacctacgtcaaaaatacagccattgattatcaagtcgaaaaagatggcaaaactctcaccaaagacaagaaagaaaagttaaccttagcaccaagttcacgcatgcccttcttgattcaaatggacaatacggagttttctccaggaacctataccgtcaaaatgactgtacgctccggagaacaaaaatggaccggcagtccaaccttcaccataaatcaagaaaaagccaaggcttacaatgttcaagatgtttcacttgaaaaggacacgacaacaccttggatctgggcagggatcgccgtgatcatcctattactagccgtcgtaatcttcatgtataaccgaaacaggaacttgaagaagaaaatagatggaaaataaaagaaagcggcgcctcttcatttcaaaagaggcgccgcttttttttaataaggttgagtagctagacggattgttactaaaataaacaacgttacagcaatacaagaagcacgatacacagcaaattagcagctgctaaaataaatgagccaaaaacaataattcctattttctcccgtaatgactgccgaaggtcccatcctctttgacgggccaatacttttgtacgcatatccttttcctccttacccattccaaaataataattgtccaaaaaagtcgtttgattcaaatgccgtcaatcattcagcgaatgcttttgcctttaagaataaatcagtacaaatctatccttctgtacacctagattatatactgaaaaggatttgggttacccccaggaacttgttaatctgttaaaaaattgattattcgtaacaatgagaaaactctgcggtcaccttccccctcttgtctaaataatccaacttgtcgttttgatagatagtctcgtctactgtcaacgagatttgacatgacaacaaaaacaaactactataaatgatagtagtcgttctactatcactcgtagatagattaaatagaaaactggatagaaagaagggtttagcgatgcgaacgattgatttgattgttctgggaattctaaaaaaagaatctctcagtgcctatgatatccaaaaacttattgaataccgcaacatttctcaatgggtaaaagtcagtacgccaacaatctataaaaagatgctgcagctggaaaaacaaggctacgtcaaaagcaccctgaagaaaaatggaaagatgcctgaaaaagccgtctactcattaaccaaaaaaggcaagactgaattcgagaaattaatgctggggatcgctgctcgccctatcaatatttttctagatttcaatgccgtgattctcaacctcgacagtctctcccccgcagatcaaaaggcctgcatcagtatcattgaggctaatgtacaaaaaatgaaagcaaccttggaagaaagccttctaaccaacaaggctgaatcagatattcctgccactggaaaagctgtgatgcatcagcagttacttttaattaaggccattgaggaatggattgttactgtgaagaaaggattttgaggataataatcggaggacctatctatgctaaataaagaaaatatctataagagttcattttcaacaatcaatggcaatatgattatcctttctccccatccattactgcgaccctatattgccaattatacttttactgatcctagcaaaatgcatccgcagcaaacaattctgcccaccatcagttcaacccttgtgtgtacctttcaaaacggtcaatttaccgcaggtcttcgaggtgtaaacacaaaaccaacgatgattgctgactatgcgcggcaatttgattttatgtttttagtagagtttcatgcgtctggactttatccttttctgaacattgatcagcatcacctggctgacaagggatttctctttgcagatttaaatcaggcattgtttgaacaaatagccgaagcatattacactgccaaaacgattcatgaattggcgagtaaattggatcaaattttctttgaaaaaataaatcaaatagaattgaatcctgcgttttgcatcgcttttgaaatactccttaaaagcaatggatcagttcgtgtaaaggatctggcaaaggaaacgtattacagtgaaaagcaattgaatcgcttatttatgaaatatgctggagcgaaggttaaaacctgttctcgaatcatccgcatgaagcgagctgttgatctattacatagcaaacccgaaatgtccttgctatttgaggagaccggccatcatgactatgctcattttatccatgacttcaccgcaatctatgggatcactcctaagaaatacatggaaacgatgtcccttttttacaatgacccctataaattgtaaaggtatactttcaagtaaagaagaaaggtagttgaagtttatgttttcaccctatatccgttttaatggggcatgcgaagaagcatttttatggtatgcccaactcttcaatggcaacattcaacacatgtctaaatacgatgagatgcctgaaaatcctaattatccaattcccacagaactaaaaaacaaagtcatgcatgcgcgacttgctatcagcgaatttgatggcatcactggtgcagattatccagaaccgatagtaaaaaatggaaatgtcgctatccaagcccatttacctgaagaggctatggctagagaggtcttttcggagctatccaatgaaggaaccgttgtcgcagcaatcgccagcaatcccccacccgatgacagcagtatcagcggctgtgtgaaggataaatacgacgtgacttggatcatttcagcgatgaaatagcttaataattctctatgaaccaataacgatttcggttattggttttttcaaattgacctagtaggtaaatcctgctacactctaattaacctactaggtaaggaagtgagcgctttgactgaaatcaatacgactgatccaaagattcaacgaattctgaatgcaggattgcgggaattttcccaacgtggctatgaggaagcgtcgacgaatcgaatcgcaaaagcggctggaatgtcgaaggccttgatgtttcactatgtaaaaagtaaagaggagttgttttcgctcttattggattattgccaaaagacaatcgctgaggattattggacgaaattgaactggcaggaaaaagatgtttttaatcgattactgcactcttacatgttacaaattgacttgatgaaacggaacccttggattcttgattttacgaatgtaaagattgaaacaaactctgagatgatcaatcaaaaagtagctgacctagctaaacgacagcattcttcttgtgaaaaggatttatttgaagggattgatgaaacgaaattccgaacaggacttaatgtggatcgctgtaagcaattgattctttggggaaacatcggctttactaatgagattttggatggattgaaaaatacaaatcctgaacagattgattaccaagccatcaccgataagctaacacagtatttagaagaccttaaaagcgttttttatcaagagtaattagaaatgaaaaaagtgctgattcttgctggttgtctcttgtttttttggtctttctcacaattaggcacaaaaaataaccccctgcagaaagtctagtggtaataagtcaagataatttttcaaaagatttttaaaggtagttaatttttgaagcgcactgaactaaacccgaccaaaattaaaaattttttcgggtacttccaaggattagcgtcaataacatactgttatttatctatcacgctccttggtggcatatagagttgatggttacgtagtagcgtatccaccagacgcgtaaattttcttgcggttagtacgatggctcgtttgtgtttatgcttgggtgtttcagcgtattttttcttataatacgcatggtactcaggctcgtatctccttacggagttggtggcttcaactagataataacggagataacgattgcctcgtttggccataggagtattttcatactcagagttacctgattggttctgtcgccaatataaaccggcatatttagccaatttgctttcatctgaaaagcgattgatagggccaatttcagcgagtatacccgcagcataaacaggaccgattcctggaatactggttaaacattgatattcaggtagcacaacgactaaatcgtcaatggctttgtctaagtctttaattaacttttcaagactacgaatttctttggctagaacacccaaaacaatatctacagagtcctgatggacttttcctaaccggtaggaactacgtatggctttagaaattgcctttgcaattccttcgggatttttaaaacgatacttccctagtttttgaattaggttcgcaaactcttctaatgacagttcggcaagttggtccattgtgtaatcttccgtcattagagttactaatgtggcacttaaaacggatccaccttctgcttttagttctttagaaagcgtgttgcatttataataaatgttttcgataaagtgttgctttgtacgaaccagctgtttaattagctgataacgcgttctagttaagtgttggagggcaaggtattcttcctctttaatgatggagttgacttgcctttggatgcgaaaatagtcagcgatataaaaagcatcaatttgatcgtttttgttttcttcaaaaatatcacgatactttttaattttatttggttgttcaactgaaaccataaggttcaattgatttaactcaagatcttctttaaaaaacatagctggatgaaagctatataaagatgtggcctccattccaatcactaagctctctatctcaaatttttgagaaaattcgagaatgtattctttgatctggcttgcgccaagttgactatttccataagatgcttcttttaaaacagagcaagttgaatcgtctgtcataaagcaagcatctaatttttcagaactaacgtctaaaccgacaaatagtttcatgtggaaggacctcctttcattgattattcggaaattgcttgggtactgtgggatatcccagaatcacgttgtctaacgacagcctcgcataatagagtttcattcattaaacctctaagccacccaatctctactaggattggtagaggtcaatggactcagctagtgtgttggaggttataccaacggttcgggtcacagactttctgtcgcagtaaaactgcagaaggtgatagcgtcttcccgtaagtcctttccaagacttattattcaggaatatcctacagtatccaagtagtaatcgttattttatttaaacatattaggaatagcccctaagggcgattgaaggaatgaaagtttcttcaaaatatatattacgagaaggttttgtgatgccaaacgaagcaactacgattgcctttcccctccgtggtgaatggtacactgaaacaagcccagctgatcgggttccaagtcatggaacgaatcgttttggactgcgctatgcctttgatttcattcaaaaggataagaatgaccgttcacatactgctaattcagccgactatctgttaggagggattcctttaaaaaactactattgctttggtcagcctgtctatgcgccctttactggtgaggtcatcacagtgaaaaacaatacctctgatggcgaaaaagcctcatggcttcatgatcaaacaaccgctattcgccactccctctttttcgatccagaacgagacggcttcgaggcaatcgctggaaattatatcgtcatcaaacgagctgccagtatctacgctgctttctgtcatctgcaaaagggttcaattgctatttcagaaggagaacacattgcagaaggaacctatcttggcaacgtcggacattctggaaattccactgagccgcatttacattttcaactgatggattctgctataatcgaatcagcaaatggtctccctttggtttttgatacctatgaaaaatacaatgggaacacgtgggaaatcatccaaaatcagtttcccgctgctggcgaacgtattcgttcgttaaagtcagacagaaaataggtgaagcgtttggaaatgaataatctatataaacctcagaaccatcaagacctgagagattggttagaagaaaatgctgcaagtgcaaaagattgctgggttgtgattgatcgcaatcaaacctgacctatttagacttcgtggaggaagctctttgctttggctggatcgacggtaccaaaaagaagctttccgaaacggaaattgggcaacggctctcacctaggacgaaaaagagccaatggaccgagctgaataaagaacgagctcgccgtttaatctatttagatttgatgactgatctagttcgagcaaccttaccggatttgtctccagaaagttttgtgatcgatccgcgaattatgcaggcactcgaagcagatcctgaaatccaacaaaacttttcagcctttccagagctttatcagcgaatcaaaattgataatattcaacgctatggtgcagatgtcgaactattcgaacgacgcttggaaaaattgctgacaaacaccaaagccaatcagcttttcggtgcttgggatgacaacggtcgattaagcagctacaaaaagaactcttaataaacatacggaagtgaatcacttggtttacttcctttttgttattcccttcgttttcgcagccgttctatcagccttccgcgttttttctttcctctcgttggcacagcagttgccgataaggaatctggctcttcctcgagtttaactagcagtcggaacctaactggatgtgtctcctcaatgacgctaaaatcttccaccgttccgccctttggcaccattgccataatcaaggacgctgcttcgctttcagagatagcttgcggttcgattcctttgggcagctcaaataacagctcaagcattccaggcttgattagttcttgctgaacaatcaggtctttcggatcctgaatagtatctatggggctttgctcgtttactggtttcgttttgggactttctaattgagtgtcagtttttttatcgaaaatcggtgtctcaattgtttcgataaattttgcagtaataaccttctcaaaaaaattaacgccatccttttcaaagatatctaacgtcgtcaatttttctagcgatgttttaatttccttcgctgtcttatttggattggcatgtttcatccgccatgaatgttttctgccattacttttttcaaatgttgccgataaacttaacatgatttcacctcttcttttagtcttaataggtcactctttccaaacgtcatgaacctgccaaccttgtcagtggttctttcatgaattgagtatagaatttttcgattttctctgtgatataggttttgattgaaaacagtctgatggatacgaccttccactcatcagaagaaaaataatgcttgaaatagaaataatagcggcgcaatatccgagaagtcttagtctctaaaaacagcttacgaacaagccgtttcatgaaaaatgaaaaatcctcttcgcctagttcgtctcgcacctgaagcgctatcaaaatttgaatagttgatcccgcatcacggctttcttggtaatgtttatctattcgtttctctaatgttttaggtcgtagcgaaaaaacttgtcttggtgtaaataatgcttctgtcaaaataatgctcctctctgattggtttgtgatcacgcctcgactataatcctatgaaaacactcctgtcaatcgacaaaatttttttaatgtccgttttggagccattcgacaacgacaaacccgcttcgttatgcgaactaatcaaaaaaaaaacttagaattttattttctattaaaaaaagaaaccgtgagattcgactattttgcgtatcttatttcttgtttcttacggctaatagcgtaaaatgagcatagaaagacagtgaaagggtgtttgcgatggaaaattatgtcatccgaatcgatattcccgaggttgaagaatacttggcactgcgacagatttgcggattgtctgcgcgagacaaagaagccagtaaaacgggattagctaatagcatttattcggttattatccgaaataagaccgatgaaaaattgatcggaatggggcgaatcatcggagatggcggtaccgcttatcagattgtggacatcgctgtccatccaaaggaacagggaaaaggtcttgcgaaagcgatcatggcgctgctgatgaagtacattcacgatgagatcaatccacaggcttatgtcaatctgatcgctgacagaccagcagataagctttatgaacagtttggctttgtagaaaccgcacctgaaagcctagggatgtatttgaaaagataaaataatgacaaaaacaggattcctcgaatgaaaaggaatcctatttgtcagtttatttagtgaatactacaaaaccgggtaattctggatgatcaattactagcccctcgtgaatcgaacgcgcactccaaaagatcattaaatcacctgctgccataaaaatattaaaggcagaaagtaagatcagctcagtatttggaaacagcaacgacaggaaaaaatagccgccccctagtaccacaactggtgctaatacaccgattttataggcctttgcctccagcgcttctttacaatgacaatacggcatcagctccttgacattaaagccaaaggtgatgcttttcattttcttttttgcataattcgcccacgtcaggccatgaatcagctcatgaattggaatggatacaataaacagaatcagaaataggagaaaattaatctcccataatggcgatgcatccgctccccagcgccaaaaatagccaatcacgaccaatacgataaatggaattggcagcagcattccctgtgtcccagcttcttttgccgaaaaggtcttatcctgcatacgatagtccttttcttccatttcctggcaaagtgcatcgaataactcatattttttgtttattttgcctttctgatgctttttcttcataccgtaaccccctttttcctatgccctcacatatttttttaactccttttaaccctttctattgccatcatatacgtttttacctatccgcgtcaaaatttgaagtcaggttatccttcattagaaaaaaccagaaactttcctaaaaaagtctccggtagattgatcataagtttgcttttgtagcacaccacatttcaagaacgaaaagtgactttgacctactcttctttttttaaataacctacacaaaaaggcagtatcaaaacgataatggcaattattaagcaaaccatagtcaaataaataagcacttcatcagttgggcaaatcacactaaaaatcacaagaaaatagaaaatcatctgaagtatccgacttgctttattactccttcgataaattttttcgtttctacttgaatccatgagcgtcattcctcctaaatgaaaaccagactatctatcactgggccactcaacaacaggaataaaccatttgagactgcttacacgctatatataaaccaatctcccctcactactattataaaggattgtttatcgtttcacttgttcgtttttttgttattttagtaaattattggtatttttggattcttaatttcggtctaaaccatacttttttgtatataaattaaaaattccaatctactattcattgaacaatcggcaaaaaaaatcagcgaagatttttcgctgaccctaaaaaaaatattctatctcaatttctgattgatttgtttaatctcgcgcttatatttcaaataatggaatatccaaatagcaaaaaagattagaaaaaaggagaaggaggccgacaaaaccacctgccacttaaagggaaaccattgattcacccaagccacaatcaaaaaagcaataaatcctccgcccatctggatcaacgtttgaacaagaagcgacaactttttcaattcatagatcagactcaataatccgatcactaccgataatagaataaagctaaggacgatttttctgacttgattatcggcataaataaaggcaaacagcatgcagatgctactgccaaagccgacagattgtcctaatagtttaagtacgcgtttcattttgacccctccttttgattcctaaatgctgtttcaactgatcgacaaaccgacgagaaacggtgattctttgaccgttactcaaataggcaaataaactgccagaaaaggcaatctctaatttttgaatagcctttgtattgaccaaggctgattttgaaacttgcaagaactgatcacttggcagttcttcttttagtgccgtgagagacttgcgaaaagaatacgtttcctttgcggtataaagtgttacgattttattgaagatttctaaataaataatttcggttttatttaataagacaaactcatcctttactttgatcactaattgctcctcttgaaacgcctctaaacagctgacaagctggttgcctgttttctcttctgccgcgcgaatccgtacctcgggcgctatccaattctttccgatttccacttgaatcttcaaccccttcaacatggatcatcgccacctccttctctatctttatagtaagccatttttgaagagtaaaatagtcttttttcctttccggtaaacagcgcgcctcatccggtaaaaacaaaaaatgaacccttcttatgaaagagttcttttgatctcattcttctgttttctcattcccaagatctctaagttatgcgcgccaagtagtctaatccatccttccagtactgttaagacttcgcatgtaaagaggagagaggaggtattagcctctattttctagatgaaattgactacctggcacacaacagcaggattcttttatgcctcctagcccaatagtaatagctgttctaaagaagatcaatcaagcattgtccagtgtgtcttacactcgaatcattgattctaagcttttcatccgttaaaagatatggtctactttttttgatgccttgaaatttatcaaactgaatcataaccatcagtaatcaactaaaagattgaaaaaccatttttttcgcaaatcattgagtatttagaggatttgtccagaaatgccctttttgaaaacaaaaaaccgagtaaaattcttcactcggctttcaatcagtttattaagctgtatcaattaatcttggaccatttcgacaccgaccggctctgccgcgtagtcagtctcgctgtccgtttccatcggacgctctttcaattcaatttcaagctgatgctgctgcaaaattccgatcttttgtgtgatcaataccaacagttgtctcaagctttcttctgaattgattttgttctcaacaattgcctgacaaaggtattcgatttgatgacttagctcaaatagttctaaatagctttcactattacgatcaacctcacgaatcaactgccaatctgtatcatgataataggtatcatacatgataaaatctaatcgataaacgcccagtacgaacaaatcccgtactttctgactttctttcaacagcttcgccagctccgtcgaaccattcgcgatttctccacccaattctactagcgccgaataattattttgatattcctttttcagcttcgtaaacaatcgcgttgtcttatgcacttccttctgcttttcccgatatttcaagtattgaaacatcaatagcgctgctaaaaatgaaaagaagcaaccaaagaaagctgttgacgcattgacaaatgttcgaatgacattgatgtgttctccgaaaaatgctcggttaaaataaatcaatccgatgctgatcaccgcaatgacttcaccgaccaataaaacggctaaagcaacaatcgctaatttttgtttttctgaaatcatttttcaccacacattcagatgaatgcttctccttatattttttctcccaaacccctaaaattaagttactttccctccttgctttattcgctaaatactccagaaattatttccagcatatttaatcaataaaatgacttttttataacgaaacagatattttagcgtttaataacgttttttattatatcatttatcatccgtataataaagaccttctgaactttttggataattgttttatttgttatatttgaaataaacaaataattcaccaaaaaaacaccattgtctacaagctgtaaacaatggtgttcgcgcctatttcatgttgttgtaaacataatcagagactttcagtatttctccataacggaacggtcgctactctttcttaatcaacccttcaacctgcggcaatccaatccctgccgtataaacttcaatcaagcctgacggcaattccaaatcctccgtatgtcctttgacattcatgtggatcgtctcttctttatctgctaagattttttctttgaagtctggatcagataatgctgccacacccatcgacgccacatcgccgtagttcagtgcatccaaggcatcatcggctgaacgaatcgtccctgagataactaccggcactctgcctgccacaaacttcttgatcactaagctaactggctcagtaaaatcgcctctttgcggcatcgccttataagcatctttaccaaagtttccgcctgctgctgaagataaatcaagaaaatcgaggtcttgttccaacagcttatcgatcaatttcaatgaatcatccaagtcatacccgaccatctccccatgaatctcttccggtgaaatccgatagccgacaattgcctcaggattctctgctcgcgcgactttcaagacttctttcgtcacttcaatggcaaagttcatccgcttttcaaacgagccgccccaataatccgtccgttgatttgaatagctagagaaaaactgctggatcaaatagtgatttgccccgtgaatctccacaccgtcaaagccggcttttaacaagcgctgggccgctaagccaaaatccttcaccacttgccagacttcatcttctgttaattcggttaccttgtattgcaaaaatggaaattcgatcgcacttggtgcgtaggcctttccagtgacatagcagccatacgcgccttcacggccgggatgctgaatctgaccaatcgctttgctgccattgctcttcatagccgcagctaatttgctgtaagcatcaattgcttcatcattaaagatagataattgtttcggatgtccttggatattttcctgaaccgtgatcgcaccagtaatcaacaaatccgcaaacttactgcgccgctcaaagtacttgatatcctcctccgttggttgccccgttgctggatcagctgcgaaaaccaccatcggacacatcgcgaaacgattctccaaacgcccgccgtgcttcaatccaatcggttcaaataatgctgcatatttttctttcatttatgattcctcactttcttttatactcgtgcatgtgttgtataccagccgccgtcgatcgtgatggtcgcaccagtgatgaagctagctttagccgatgctaagaaagcaaataatttcgctggctcccaatcctcaccgatccgccgactcgggatcgccttcaatgctgcttcggttcccaacatttcccacgcttgatccggcatcaaattcgtacggatcaatcccggacaaaccgcgtttacccgaatgaaggtattgtcgccttcatcgatttccgttactgctttaggtcgcccaaacatatccgctggattattatttaacaacgccgccgcactttgccgcgtgtaattcaataatgcggccttcaagacattataaggaaccgaatccccaatcatgaaggaagccaccgaggcggtgtgggtgatactcggattttccgacttgcgcaaaagcggcacacaatatttagtaaacaatgcggcatgcagcacgtacaattgaaaggcccgttcaaactcacccgaatccacctcctcaaccgtacccacgatcgcagaacccgcattgcaaatcaagctgtctaatctaccgaatttttccttcgcaaaagccaccgttgctttgatctgctcctcatccgtcacgtcacatttaaacggcaaaaagttctcgcctaactccttcgttcgactgaaatttcgcccaatcccgattaccgttgccccctgatccagaaattccttcgttgtcgccaagccgatgccagaagtcgcgccagtaatcattacgatagaatcttttaacattttattttcccccctagttactgaccgtcatcaagccgccgtcgatcaagacatcggcgccattgatgtactgtgcatctttcgaggctagaaacgcgatcaaatccgctacttcttctggtttccctgttcgtccgcaagtaatatgcgccatttgatcatacatcgccaagacatcagcttccgccatattgacaccatctcgttggaagattggtgtttggataaagcccggcgacacactattacagcgcacgccaataaagccctgggcttgctgcttggtatacagcaccacggcgtttttcgctagattatacaaaggattttcagaactgacagttcggctggcggcagaagcggtattgataatacttgcgttgtttttcggagcatttaataaaagaggatacaattctttggcaaacagcatcggtgcccgcagcaaaagactgaagcagcgatcaaattgatcgaccgtcacatcacgaatcgtggtattctcaccaaaacccgcattgttcacaaatacatccaactcattgtcaaacgtttctttgataaaatcacacgtctttacgatctcatcggcatcccgcacatcacaggtccgaggaataaaccgatcacctaaatccttcgtcttgctaaaattccgaccgatcccaatcactgtcgcgccctccttgataaacagccgagccgtagccaggccaataccagaagtcgcaccagtaatcacaactttgtaatcttggaacatcgttctacctcccttttcaaaaagcaaaaaaacttcaaatgaaaataggacagttacatttgttcaattagaaactcttgttggattttagttgcagacagatgtcttgatgaatcgaataaagtttgggggatactacgttactactacaatgatagcattaatcaggtgcttagaaaacgtcttcatgaaaaaggcacaatatttttacttattgacgttcgttcttgtaaaaagctgattgaataaaaacttctgaagtaatagccgttttcttaacctgtctatttgtgattaaatcctatcttgacattcaatttggactacgatacggttaattaaagagatttttagctaagataggagaaatgatattttggacgacgaggactcgttgtgtatagaaaaaaataatcatctatttattaataatcattttaacgtgcgctgttggcatacagggtgcttttttacattggttgaaaaatataaggaggaaactttttggataatctaagtgtcatgatggttgtattggtaatattgctggctttgtcagcgttcttttcttcgagtgaaacggcctattcttcattaaatcgcattcggatcactaaattggcagaggaaggaaatgacaaagcaaggaacgttttagaattgtttcataatttcgatcgccttctatccgcgatcctgatcgggaacaacatcgtgaatatcgcaagctcttcgattgcgaccgtcctatttgtacgctattttggcaacatcggcgttacgctatcgacagttgtgatgacgattttggttttaacctttggcgagatatttccaaaaacattggcaaaagaagcacctgagactttcgcacttgccgttgcccgcccattgaaaatcttactgaccattttttatccactgacgctctttttctctgtcttgaaaactggtctgatgaagctgttaccaaacaaagaagtcaccccttccatcaccgaagatgaattgctgattcttgtggaggaagcagctcaagaaggttcgatcgatgcagatgacgagctgctaatcaaaagtgtggtcgcattcaacgatttggaggtacaaaaaatctttgtgccccgtaccgatattatttccattaacagtaaaaagagcaccgaagaaatagctgaaatttttgaatcctccggcttatctcgcctgccctattgccaagatagcatcgatgatgtgaccggcgtggtgaatcaaaaagatttttattaccatgtgctaaaaggtgaaaaaagaatcgaagacatcgtcaaaccaatcagcttcatcccaaaaagcatgaaaatttccgagctaatgaaaaaattccaagccgatcaaatccatatagccatcattatcgatgaatacggtgggaccgccggactcgtcacactagaagatatcatcgaagaattggtcggggaaatctgggatgaatacgataataagaaactggattattacaagctggcagatggcagcttcctggtaaatggacgctcagacttcgattgcctggaagagctcttcaatattacaaataccacgaactcaatatccgtcgcaggctatattttagcatcaatcgaacgaattcctgtagaaggagaaacgattcagttagatgggttgaagatcactatttcgaagatgcggaatcgcaggattgaagaagtggtgattgaaccgattgttgatgtagagtagatggatgatgttaggctgcaaaagattattgagaagactaagttgctcttgtctcgtcattttattctatgacgagacttgttttatatcccgtagagagatttttttaatagactcacttccctgtttttactttttcccattctcttttataatagtctcgcaaaaattctgtaaatttttcagcgttcatagaattttcttgaaatactttttcagtctctctcaaactttgaattaattctttttcactagtcatttgatcccatcctgaagttagagaatgcctcctcagcccttcatatattttaaaagctaaatcaactattgtattattctcatcattgttgctgaaatttaacttaattaacatgaaattattggataacctttttaataattcattgatttcatcagctctttcttccatatctttattaaaaatttttgatccttcatctatccaatgttgggaaacttcttttgctttatttctctctgcttgcggtagttttttattcatgcttttctcatggagttcgctcatttcaatccttattccattaagctgaattatcttttgtgtaaacattttcatatttgcacccaatgataatgaatctgttataaaggtagatgttaccatcttagtattatcaatccagtgcattcttgattttgaaattatatccgcatcgatttttttctgatccatctctttttgaattagtattgatttttttgtattatgatagcttaaaaaagaaaacaataacgatgctaaagcgccaaaaaccgcaacgatcgcagctatacttgcccattgaaaatcacctttaaaatcaaaaaatagtctttccatttttcacctctacaattaattatcaaaacgatttttcaaaaatacctcattatgcctttctcaacaattaatttctaaacgagtaattgttcttaatatttaatcataataatatttcgaattccacttatattcacagaccatcaatacctacatttctattcaatatcgattttgttttctttttcattactagttaaattctcttctttttgcaactcatatctgacatcttaaacaaaagtaataatctcctttttaaccttgaatttacactttaagtgcaacacataaaaaatgactcataatcaatatccaactagaataggtttgtcgagaacactactaggaggaagataattatgagccagtatcatcatcttaccatactcgaacgagaaagaatctttctacttcacgaagaaggtgtttctattagaaaaattggaaatgacattcatcgtagcccgtctaccatttcacgtgaactgagaagaaacaaggagaaaacctactccccttccaaagcagacaaaaagtatgcttctcgaagaaaaaactgcggacgtcataaccttctaaaagatccgcgaatttggtcaatcgttcgtcatttatttgtcgattttcaatggtcgccagaagaaatttctaaccgcttgaagttcgaacatgcggatttctccatcagttttatcacgatctaccgtgccatttacaacggtattttcgatacagaaccgctctcccatggcaatagaggactgatccgttcattacgtcatcgaggaaaaacaaggcatacaaaaaatcacgtcgagactcgtggaaaaatacgcattacgcattcgatccatgaccgtccaaaatccgcagacgatagaagtgagtttggccattgggaagccgatactgtagctggaaaaactggtggtgcttgtttagtgacgttgacagatcgaaaatcgcgattccttttagcaggaaaagcgccgagaaagaaagctgcttacgtgagcgaaaaaatgattgaacttttaagcagtatccccaatgaggtggttaaaacgatcactccagatagaggaaaagaattctccaatcatttcgcggttacagaagcattgaataatgtgcccttttattttccagatccgcatgccccatggcaacgaggaacaaatgaaaatacgaatggtcttattcgagaatacttaccaaaatcgaaagagatggacacggtagatgacacaacgatttatcggatggttgaaaaactaaatagcagacctagaaagtgtctaggttggaaaacaccttatgaagtcttctttaataaagtgttgcacttgatttgacaattcaagaccaaattaaaagcgacattcacagatatgtagtaaaaacaagtaagaacagcgcaaaaaaacatatctttccaaaactctaaaagataatttcaccttaaagaacaaattagcattccttttcatgttcctctgaaaaatttcataagatgtattattccctattgactctcttttaatttcgctgataatccaaccaattcacgttatttttaatttaaccattttgcaccggtagatccaaagcaaagtaaagcttagggttaaaactattgtctaatacaaatgaataccaatctataatcttaagtttcaacattattgacttaaaactgttcaagtcaaaattttgatttttaactccttcataaacgtattttttactatcatcaattaaccacaaaaccgaagtattcttgcaacttactatttttttcaattttgcattggaaatttttggatacctatcttctttatatttcctaccgtcattatatttagctaatgttgattcgactgacagctcatttttatgtgctaataactgaattgaaagaagtgattgttcaaaactatacatagctagtgaagttttggtccctctttttactgctactaactccttcttacttatatcataaaaatcagcgatttccgcttgaactccagaaaccatcacatttcgtttgtgtaactttattaaattgtttttttgggttactacatggatatagcctccttctcctgaaagctcaccctcctcttgagtctcataagcaatgttataagcctccggatagtccacaataccattaattatgtttagtttaattttaagaagctcgtaaaatttttcattgaagtatccccaataaccgttatctaatatataaaccttttcctgatactccagttcggcatacatcagatgtgaaaaccttatattatcttttatgggtaatccactatcatcacatatggagaagcctatatcatctaatgagttaattttcccggcatattttttaatgtaactgcaaattttcatttcatcaaaatctattgtttgaaaagtttcttccttcttcttctttccacccataagataaatacctatattctgatttgattcaagaaaattaattgcattatcaaaaacttgaattctattcatattgaaagacagctgagaattaccatcgttctccttgatactcctaagtaatttatttgataaatcttgacttagctcattctttttttgtatcttaatccatcttggaatactcgatttcttttccttcaaatttagcgtaatatctatttcattaaacaatgaaacaaatttatctatgctaaaatctttctttaaattaaagtttttgcagattgttaaacctgttccacagtctacacttttgccatatatctcttcattctgtggttttccactgataaagaaataactttcgcttgcttgaggaaactcattttgaccttttttgtaatttaaaacacctctcattttatttctctgaacataactaacactctttaaagaaatgtcatcatctcttatcgctttttccgcaaaatttaaaccgaaatcagattcgctcaagtcatcagttacccaaaatgcgtaaccacgtggtagtaagtacaccgatttagttgttttaacaactatgatagcattatattgtattggcttttcatcatcaaaaaagttttccttatcaaaaaaaagtagtaattcatttatccattccggatgtgatttttcatgcgactcgaaataaagactcattcttacactctgatccgaatatttcttttcctctccaacttgagaatagcttgatctctccagcctttttatagtttctgcgtatgaatattttgatttataaactttcggtttcatatatatctctcactttcactaaatcttatagcctttaaaaaaatatttactcatagaaaaacaaatagcaattaatttctattttatttgtgaatagcaaaatacaagaatagatttttttaaagacaaactcttaattccttattcctccgccaccaaactatcaagatatgccctaagcttcttttcttcttcacttccattagtagaaaagcgcgcaagctttatccctaatttagataaaatactatctttccgcttatctctcaccacctgttccggtctcgaatgaaacttatgaccatccacttcaattgcagcaaccggttcttttcctgttttaaagtagaaaacaaaatctaatcttgcaccattcttaacatattgttgctcatctgttgtcaacactgaaaaatctctagctaatttctttatcgtatattctgtcgtacacgtaattgatttgtacttttcatcagctagaatagttaagatcatatccatcattaaattttccgaatcaaaattagaatgtttgattttataattatttcttcttctaaacagctcatcttgaaagtcccttgttaacaaatcaaaaattgagttcactggacttttatgctccaatgaataatcactgttatacttaatatgtctaattaaacttgcgatactgccatttctcttactaaactctttcacagaactattaagaacaaaaaggcgcttagctcgtgaaactgcaacattgattaacttttcatcctctacaaaactataatttcttttacttcctttattatctaaaacagtagaaaaaattattgcttcacattctcttccttgaaacttatgaacagtatctgcaacatacttcttttgctgtttttcaatagcagcaagacttttatccgcttgccttctaaaaggtgttactagtcctgtagttttcatatcatgaataatcgggcaagctttactaaattcttcagataaaacgctatcaatctcacgttgattaaatattttcttgtcatagtcaaacttcatatgattaccatcagatgtttcaacaagaactaaagctttttcgtcttcattaaaatcacttaaaacaattaactctccatcgtagaattcctgattacaaaaattgataatcatcggatggcaacgatagtgttcttttagcaagacggatggaagttcttcaccaaatactgcttctattgatgacaagatactatgttcaaaataatcgtatgttctatcttgaggaggtcctatatttttctgcttctcttccttatccgttatgatattaggtaattgtttattatcaccaacgataacaatattttttgcaacactaagtggaaaaatactaggaactaacccacccatagatgcttcatcaattacaacaatatcaaatttattacctttttgaatattcattgtaatcgcatcacaagtactaagtgttacgggaaagtcttttgtaaattctttataatctttcctcatttgatctttggtcgccctactatttccaacagtgtatttactactcaaaaaagatttaaatattcttattgatagacctttaacgctctcatcgagtttcttatagttgcttcctttcaaaaatgacgaagtttctgctatttccttttttattgatgctattttattttgataatactctcgttctacataatcaataagttcttgaatagattcactagagcgaaaaggatcaaaattatatattccatattgaaaaaaatatttaattttctttccaaaattaagttgctgatcatcatttaaattcaaatctaccaaaagtctcattttcttttgggcatcgaatctgattaaagatgttcgtttcagttttgtttttaaagtactattagagtcagttctactctttatataagattcaaaatattttttttcttgctgccaatctctcaattcttgttccaatgtagctagtcgatttcgctcatctaaaatttgacttaaacttataaggtctttcgttagtttctccttgttactgtctaattcatcttcaggtattctccattcatttattatttttggaatagacaacatatttttaaaaaaagcctccgcttttttagttttccctaaattggcagcgataagtgaaagcccctctttttcaagtttttcaaatacattatctgtagctgcattgttaggagatactaccgctacagtcttattattcattatggcgttagctataatcgttaaaatagtttgtgttttgcctgtaccaggaggtccttgaattactgaaatttggttttgaaatgtttgctcaacagcctttaactgactactatttatcccaaatggaaatatcagatcccctacatattctctatattcattttgcttcatcaaatatccgtataaagcgcttgaaggatcgaaaaaatcaatctgctcacaaacgcattgatgaaatcctttttcatattttttagagttcttatctcctagctgtttggctatacttataaaatacctttgaaactcctctatttttttctttgatttagtatcgatattattcagctccaatttttgtactatcatttcatgacatatttatacatagttttcttccccatagttcacacaaaaatactgactaataacatatttaatatgcttgtattcttaaataataacacatttaattaattataaacatgtcttttgctactactatttcttaatataaaaaaagccccgaaacgttatcttatcaacgtttcgggaacttataaaatttctatccgacgctgccttccatctcatactgaatcagacggttcaactccacagcgtattccattggtaattccttcgtaaatggttccacaaatcccataacgatcatctccgtcgcttcttgttcagagatcccgcgactcatcagataatacaattgttcttcagagatttttgaaaccttcgcttcatgctccagagacacatttccattcaagatctcgttgtacgggatcgtatcggaacttgattgatcatccatgatgatcgtatcgcactcgatatggctgaatgaacctgcactgtttcgtccgaagcggaccgttccacggtagtctacggcgccgccatctttagcgatggattttgaaacaatcgagctggaggtgtttggtgcattatggatcatgcgggcaccgttgtctagcacgatattcttgccggctacagcgatcgatagcatcgtaccgcgggcgcctttgccttccatatagacacttgggtatttcatggttacttttgagcctaagtttccatcgacccattccattgtcgcgttttcttgggcttgtccacgttttgtttccaaactgtagacgttgtttgaccagttttggatcgtggtgtaacggcagtagccgtcttttttaacgaaaacttctacgactgcggcatgcaggctgtcagaagagtacgttggtgcggtacagccttcaacataattgatacttgcgccttcgtccacgataatcaatgtccgttcgaattgtccagtgtttgccgaattgattcggaagtaagactgaatcggaatatcggtcttcacaccttttggtacatagatgaaggttccacctgaccaagctgctgagtttagtgcagctaatttgttatcggatggtggtactaatgttccgaaatattctttgaataattcagggtattccttcaaagctgaatctgtatccgtgaagacgatccctaatttggtgaactcgtccttcatgttgtgatacaccacttctgattcgtattgggcagaggcaccagctaaataagcgcgttctgcttctggaatccctagacgttcaaaggtcgttttgatttcttctggtacatcatcccaatcacgtgcaggtttgtcgctggaacggatgaagtagttgattttatcgtaatccagttcggataaatctggtccgtaaccgggaatctctaattttctgaatgtttctaaggatttcaagcggaaatccaacatccattctggttctccttttgcgcgggagatctcgcgaatgacttcttccgatagaccttcaccagtcgtgaagacgggttcgatatcatcgtggaagccaaattgatattcctcttgcatttcaggtacactcatgtagtcccgctccttattcgtattaatgtatttattttcccttcagaaaaataagtttgattctcatgccgtataccattctactaaatctgctaaagcagaaagtagaactggcatcctcattcatattaaagtatttatcttgctaatctttatgatattgcccttcccgagctttaccttgttcatcggttaatgctttgcctaaggctttccatgctaacgttgagcatttgatgcgggctgggaattttgcgaccccgctaagcatcgctgcgtctcccaatgcttcttcatccttttcaggaatcggattgccttgaaccatttgggcaaaaataactgctaaatgttctgcttctgagactggtttgccgattactgcgtccgtcatcatagaagcactagcggttgaaatcgaacagccgctgccggaaaatgcgatatctgtgatcacgtcgtctttgacaattagttctagctcgatcacgtcgccgcaagtaggattgttcatctcgatcgttttcgtagagtcacttagctttccacgatgatgaggatgagcggaatgatccaagatcacttgtcgatataaattgtctaatttatttagcgccatctttgaaaaactccttcgtcgcctgaattgcttcgatcaaacggtccgcatcttctttcgtattgtagaaatagaagctggcccgcgccgtcgctggcagattcaaataattcattaacggttgcgcacagtgatgaccggcacgcaccgcgatcccttccatatctaaagcagtcgctacgtcatgaggatggataccatccagattaaaagcgatcacaccggtatgatgttttggatcttgaggtccataagtcgtgattccgtcgatctcatgcagcttaggtaagacgtagtcaaccaattcttgttcgtagcgatggatattctccatcccgatctcgttcaagtaatcaaccgctgcgcctaaagcgatggcacctgcgatgttcggtgtgcctgcttcgaatttccatggcagttctttccaggtactatcaaacagattgacgaaatcaatcatctcgccgccaaattctaccggttccatctgttctaaccattgacgtttgccatataatacaccgattcccgttggtccgcacatcttatgcccgctaaaagcaaagaaatcggcatcaagtgcttgaacatcaacagccatatgtggagtagcttgcgcaccgtccacgatcattaccgcgttattggcatgagccatttccgctaattctttgatcggattaatcacacccagcacgtttgaaacgtaggccaatgaaacgatcgctgttttttcgttgatgatgtcttttgcggctgtcatatcaataaagccttgatccgttaatggcaaataacgcagaactgcacctgtgcgttcgactaattgctgccacggaataatattagaatgatgctccatataagaaatgacgatttcatcgccttctttaataaaggcatcgccataactgcgagccaaccaattcaagccggtggtcgttccacgcgtgaacaagacttctgctgtttccttcgcattgataaaagctcggactttttcgcgactattttcataatcggctgtcgcccgttcagctaacgtatgcaccccacgatgaacgttggcattgtcatgttcataataatggcgcaaaacatccaagacttgcgtcggcttttgtgtagttgccgcattgtctaaataaacaagtggttcgtcatttacttcttggaaaagaatcggaaaatcttttctaatagtagaaaaatccctcattatttactcaacttcccttcgatcgtatcgatcagttgctcttgagtggctttaactggaatagcagtaataacaggtcctaagaatccgcgaataaccaaacgctccgctgccgcgcgctctagtccgcgactcattaaatagaagagttcatctgggtcaacccgaccaacactggccgcgtgtccggccgtgacttcattttcatcaatcaaaagaatcggattggcgtcgccgcgagatttctcagacagcatcaatacacgactttcttgttgtgcatcggcgcccttcgctccctttaagatatgcccgatcccgttgaaggtcaaggtagatttatcaagaataacgccgtgttgtaaaatatgtccgatcgtatgcggggccttattggttacacgagtatcgatcccttgaatttgtttgccatcactgatcgctacgatcttcacttctgaatgtgagccttcacccactaaatcagaatcaaagtccgcgatcacattgccgtcattcatgataccgattgcccaatcgatcatagaatcgcgcattaagtagccgcgacggttcatataagtcgcgatattcgctcccattgaatctaccgctgagaatttcacgcgagcacctggtttcgtgatcacttcgaccactacgttcccagaaagtttcttcgctgtctcgccttgtgattcaaaacgttctaagtaagagaactcactattgtcttcggccacgatcaagacgtgcttgaagaaatgcgcatcgtcatcgccgttatgcaggaagagactttcgattggttcttcgatcaccacgtttttcggtacatataggaagatcccattgttcatgaaagcggcatgtaacgccgtcaatgaattttcttcaacgggtactgctttttgcatgtagtattctttgactaattcaggatgctcttgcatcgctgtcactaaatccgtgaagatcacgccttgatccgcaagctttggtgagatttgttcgaaaacagtcgtctccccactttgcacgatcattggattgtctttcatttgatcaaagcttggaatggtccccgctgcttcttgatgctcaggttttacattataaaggttccaacgagcgaattttaccttttcaatcactggtaaaggcagctcatcgatttttgttaacgcattgacccgtaaatcggtcatccattgaggttcggcccattcggctgagaaagctttgacggcctcaagatattctatccattttttcatctatcttgccctcctaaacttcttctttgtaatcgatacctaattcagcagagatgcctgcgtagccttcagcttctaaacgttttgctaattctgcatcgccagtcaagactactcggccatccatcataatatgcaccacatcaggtacgatgtagttcaatagacgttggtagtgggtaatgatcaacgcgccaaactcttcaccgcgcatttcattgatccctttcgctacgaccttcaaggcatcgatatcaagtcctgagtcaatttcatctaaaattgcaaaagtaggttcgatcatcaataactgtaaaatctcgttacgtttcttttccccaccagagaagccttcgttcaaatagcgttccgccatttcttctggcatattcaacaattccatttttttatctaattttttcaaaaattgcatcacggagattttttcatcttcttcacgacgagcgttgatcgctgctcgcatgaactcagcattactgattcccgggatttcgcttggatattgcatcgctaagaataaccctagacgtgcgcgttcgtcgacttccaagtctaagatattttttccatcgaaaaggatttcgcctttcgtcacttcatagtttgggttgcccatgattgctgcggataaagttgacttaccagtcccatttggtcccatgatggcgtggatttctcctgtcttcatctcaaggtttacaccttttaaaatttctttatcgtcaatggcaacgtgcaagtctttgatttctaaaactgacatgaaagtacctccaaaatttttttctcgttctcacatattttagactaaatgagaatggaatacaaactgattcaccaattttcttctaaaaaactatcctttatttagaataattataaaaatactttttctcgactgaactaatcagaatctgtaaagagtttttgtaagaacgcttcctcggttaatttttctgtggactccttaaaatgaaagaacgccgacttctgatcataaaaaatttccgtcgtcagcttcgcttgatcgatttcagcaaacaagcccgctggaaaataatattcgtcatctgccaagctatgatagaacagaccgctgccgcatttcttacaaaatccccgttctgcccattccgaagacagatagcgctgaatctgttcttctccactgatctcaacatcctttggcaacacactcgctaatgacaaaaatggtccaccgaagaatttttgacacatatgacaatgacagacggtgatcgctggttcaacttcttctatagtaaccgtcaccgagttgcacaaacaacttccatttaatttcatatagtccatcctttcgagctgatttaaaatttatatttccagtgtaacagctagtagttaagtaaagtatgatttttttatacctttgtcagtataaaataggctgaaaaaaagcgctgaaagattttactccttcagcgcttaattaaattatttatcaactggttttacagacccgtcccatttttctaagatccaatcttgaacatctttttcatgtaggactttgttcagtttttcaatccgaggatcgtctttatcttctgtacgaacagctaaaatgttggcatatggagaagtatctttttcaagcaagacagcatccttcactggatttaaaccagcaccataagcgaagttggcattgatcgctactagatcgccttcatcattgctgtaagttgtagccaacaaagcagggtcaattgagtgatcgaattttaaattcttaggattttcagcaatatcctcaaatgttgctgtttctaaatctacaccgtctttaaccttgactaaatccgcatcttgcaagattgtgatgatgcgtccccagtctgattcagaacttgaagtgataactgttgcgccttcttttaaatctttgatgtctttgatttttttagagtacaagcccattggttcgatatgaacagcacctgcatccgtgaatttgtagtcattctctttcactgccttttcaaagaaaggtttgtgctggaaatagtttgcatcgatatctttgtctgccagcgctttgtttggtaacacatagtcatcaaattttttgatttccaaagtcacgccttctttttcaagcaatggctttacgtgctccaagatttccgcatgcggagttggtgatgcaccgacgactaatgtgtcgctcttttctttactgctgctgtctgatgagcctgaactgctatttccgcatgctgccaagccaactgttaataatgctgctgctgcaaaacctaaaattttctttttcattgatggttccccctatttttttggatttatttttaagaataattgctattctgtgttaacgtttgtctgttcgttttgtcaagaaatcgccaagtccttgaacgataaatacgataatcaaaatgattactgtcgctaccagtgtgactgtgtaattcccacgttgatagccttcttgccaggccaatgctccaagtccacctgcaccaattgcacccgccatcgcggtaaaaccgatcatcgaaaccgaagtaactgttaatcctgaaatcaatgctggcaagctttctggaatcaaaaccttatagattgtttggaagtaactagcccccatcgaatctgccgcctctagcacaccggagtcaacttcacgaaaagcaatttcaaccagtcgtgcataaaatggagccgctgataaaaccaatgccggaatcgctgctttcgcgcctagcattgttcctaccaatgctttagtaaatggaataatcaagaccattaaaatcataaagggcgttgatcggaatatattgctgagaattgaaactagtccatataagatactgcgagcagcggaatgtttccgccccaatgaataaagcagcagtcctagcaatagtcctaagacaaacacgatcaacatagaaacgatcgtcataaacaaggtatcattgatggcttcctttagcgtatcccacgatacctgttgaaagtttaaatatgtctctgaaaaactcttatccacggtgcagcacctccacttccacttgttgattttcaataaaggcgatcgcttcttcaaccttatccgcatcgccagttaattgaaccgtcaatgtgccgaaggaattccccgttgcccgttcgatattgccataaacgatgctgatattcactggaaaattacgaattacttgtgatacgactggttcattggcattgtcctctaaaaagtgcaatgtcgctaatgttccgttgggattttctttgataaattccttcagtaattcagatggatcagctttaggttcaagatcctgctgtacaaaaatcttagtcacttcctgttgtggatggcggaacacttcgcgaacagaaccttcttctacgatttttcctaactccatcacagcgaccttgttacaaattttgcgaattacgttcatctcatgagtgatcaacacaatcgtcaaccctaatttcttattaatattggctagtaattctaaaacttcttccgttgtctgcgggtctagcgcactggtcgcttcatcacaaagcaggatatctggatcattggctaacgctcttgcgatcccgacccgttgtttttgtccgcctgatagttgagaaggataagcgtctcctctgccatcaagtccgactagacttagcagttcttctgcttttttgtgacgttgatcttttgccacgcctgccaattctaagggtaattgaatattctcaatgactgttcgtgaccataatagattgaaatgctggaagatcatcccaactttttttcgaaatgttcttaatgctgctccttgcagcttggcaacatcttcaccattgactaatacttgtccatcagtaggtgtttctaatccatttaataaacgaaccaatgtgctcttgccagctcctgaataaccaacgatgccataaacatccttttcatcaattgctaaattaattccattgactgcgtggattggtccagtcttgccggcaaaacttttccccacttgatttaactcaatcaatgccatatttcttacaccctttccaataactgattagcttttagctagttcagatatataactatttttcatttcgcttgtcattgcactaatctgcaaaaatttgatgaggaagtttgactgctacctcgttgaaatgaatttatttttccaaaaacgggagaaataattctattctcattacgcatatcatccaactaaagtacgagtatccttataaagcttcaaaatttcattttgtcagtccaactatgagctgctgcgagaagttggactgataaaaaaagcttccgccctcaaatgtacgaatgtacacttaggacgaaagctttgacttccgtgttaccacctaaaattcgttctgaccttgcgatcacaacctctgccagtacttgcttcacgcgtatactgaggcgctgtaacgggcactcccgtgatagacttagcacccgcttcgtccatcctgctcaaagaccattttccatctcattgccataactccttttcagcatatcagagctctctttgtactttaatcagatgtacttttcttttcatcgctttctcatgtgtatgaaaggattatatcaggctgattttctcctgtcaaacatcaaatgaaaatttctttataggttttcaaactcatcaacatcgacttcccgtaaagacaagatccatgcatccaattcttctttcacattcaacgcagcaggatcagcaaccaccttttcgctaacagatgaaaccacacccgtcaacgggcttttgaattcttggaccgctttttctgcttcgatttccagtaatggttcaccagccttaactgattgaccaacttttggcaatgagatgaaggtcacttcaccaagtgtatccgccatttcagcagttaaacccatgcaatagtctttatcattgtgtaagatccacagaccttcattttttttcaagtaactcatttaattagaacttcctttcgtatgttgtttccttaaatccattcgttaaaaattgatcatctttgatcagtaatgggcgcttcactaacatcccgtcacttgctaataattcgctggcttcttctaccgataaatctgccattttgtccttcaaacctaattcacgatatttcatgccgctagtattaaaaaatctgcgaactggcaacccactagctgttatccacttttcaaaagtatcagctgaaggcgtgtcttgaaccaaatcgattgtttcaaactgtacatccgcctgttctaaccatgctttggctttacgacaagttgaacatttgggataccaataaaatttaagcactgcgtgtcctcctaataggttgtttgtctgcgctttgataacgcattgatagaatcaaaccgattccgatcatatttcccagaatcgatgatccaccttgactaataaacggcaacggaattcccgttaatggtaacaaaccgatatttgcgccgatattttcaaaaacatggaacagcatcatcataacgattcctgatgcaatataagcatagaactcattattcatgtcaaagcataaccgaatcatacgataaatcaaaataaaataaatcaaaattacaaaagcaccgccgatgaagccaaagttctcaccaatgactgtaaaaatcatatccgattcccgaactggcacgtagacattactaacattgtagccagtcccaaacatcccaccagaaccgattgccatcaatgcatgagcaagctgaaagctaattccttttggatcatggaaaggctcaagccaagaatcaatccgagcaaactgataattcttgaacccgatgtgtgataaaatttctcgacccgtatctgtcgtgacaaaaaatatcaaagtgccacccacaataattgctaagataatcgtgggaactaagattaaccatgaaattcccgacatcaaaaacattcctgcaaatatggccaaaaagacaagcattgtaccaaagtccttttgcgccaaaactaaaactaaaaccggaatagttactaaaaacattttaccaatcaacgtagtatcagtcttaagacttcgaagcttattcgccacattatgtttagtgataatcatcgccatcattaaaatataagcaatcttcattagttccgaaggctggaaagtcagcgtcccaaacttgaaccagtttttcgaacctgtagaggcaaataaagccgtatcgtaatatttcaacaatgccaacatgactgctaaaccaatcacatacagaaaaggagttaaacgccatagaagttttgcatcaaaatgaatgataattactacagctaatgcaccaaccacgtaccaaacagcttgcatggctaaaccacgaaaaacattcggatttctcggatcctgagtcagtgccacatataaagcaaggagcccaatcaaacacaatataaaaacaggtaaaataacgccataatcaattcggctgtcattattattctttcttaatctatccattgttcatctcttttcccacagtatacttgccttattatagacgcttatttgtctaatgaaaagtcagcatcgctgactttgcaaaatctttattcttcttgaaaaacatgtggtaaaaaatagatcaatccccaaatccctaattgcaaaatactaaacatcaggacaaactgaaattttccaacactccaattaccaataagtaatttcaatacagtcataggatgaatgaacagctcgaccgaatgaacgcggtcaaagcgaccaatataaaccgctatactagaaagaactgacaataatacaatgccactgattttctgtatcatctgtaatttaacagccgagattattttaaatacttgcaccatacccacaaacaccatcaaaagaattggcagcaacaataaaagataggaccaccaagcattgctgtcatctagaaaatgtcccccaggctgataaatcctcaaactagccaaatgaaacaaatcagtcattagatacggaatatttggaaaaaataataaccataacgaaatgaaaaaccagcgccatttactttctaatttcaaaaataattccgcaaaaacgattggcaaccatgccagaaagacattcaaagccataaaggaaaaggttccttgcgtaaagtacataaataaaatatacacccatacactcaaatggaatccgtaaacttttttcataattataaatccgccttcctacgaaaggcaccaatgaggtgatgaaaaccttagagcgccttctttctttttttattccgtgttaccctttccttgcaggtccctggtacactacagaacccgaggaggtgagtggcggggctgtatagcggcaaccccgcataattatatggtgtcggtcatccgttaaggcatcaatgaatggcgcaaacccgtagcccgtaaacttatctcttccgaagttgactcgatttcgccggatgaccagtccctaccaaacctgtactatttttttacaggaggttgctatgttcaaaatctttcgtaaaaattgttgtggcttggatgtccacaaaacgtggatctatgcgtgtatcggaatcacagatgcgaatggtcgtacagtgtataagcaagctcgcttctcttcctttacaaaaggtctcaatgaattagctgaatggcttgctaaatacaactgtaaggatgtgtgtttggaatcttccggtaaattttggatccctgtttttaatattcttgaaaaaacttgttttgtcacactggctcatccgaagtacaccaaaccccagaaaggaaataaaacagatcgcaaagatgcaaaatggatttgtgatctctttatgtgcgacatgatcaaacccagttttattcctggtcttgaaatccgccagcttcgtgatctaatgcgttatcggacgaaactgaccaacatgaaaacaagtgaaaagaatcgtgctttaaactgcttaaccgtttctaatctgaaactagatgatgtttttagtgatgtgttcggaaaatcatccacttctatcatccaatacttgttagaacatcccggtgaatcatttgatgttcgaccatttatccatgcccgttgtaaaactcccgttgaagaaatccaagcggcagttgagggggcgatttctgtacctcaagcgattaagcttcgccaatgcctcaaccatattaacgagattgagaagcatcgagaagagatcaatctagagattcaagctcttgcagaacccttctcccctgttttggaactacttcgtaccataccgggcttagacactcagccaataacagcgattgcgattctttcagaaataggaccggatatgtccgtgtttccaacttcgaaacactttatttcttgggctggatgctgtccaagaaacgatcgcagtgcccgacgaacaaaatcaacacgtatctctcgtgcagggcagtcgttgaaaccgctacttgtacagattgccaatgctcttctcagatccaaagaacatccagaatttaaaaatcgctatcgtagaatcaaagcgaatcgtggacacaagaaagctatcattgctatttgtaagatgctcctgaccgctatctggaatgtcttatcaaaggtggaaccctattctgctaaaggatatctggagccaaaacctgcgaaagaagagaaagttctgacgcaatcccaagctctggaccttttaagaaaacgcggatataccattatagatagtgcttaaaccaaagttacgttgattcttcctaaatagactcgttgtcttccatttcaaaaattttgaaaacggtaggcttatttagtgtaccgttcttcaggtatcttcaaatagatttattttcaaacttctccctcaaaagatttctccaaaacaattatttttttgaacacatcaaaatagctagtacataaaatcagctatgaccatcaccaataaaaactgtcgataaagaaaacaccaccgaattcttagccgaagctttgagacgatggtgttttttaatgatgccagctgcaggattcgaacctgtgacctacgcgttacgagtgcgttgctctaccaactgagctaagctggcgattcgtacaaaagaaattataagaaacttcagcgaaaaagtaaagtaagattcttctcaaaaagcgattacatgaaaaaaacttgaaaatgtgctaaaataaggtatgtgaaaaaagggggcgttcaaaaagtatggctacatttggcaaaatagagacgcacgttgatccttctgaagtcgggaaaaaatttcccgtcaagacacacgtcatgttcaccattcgcggcaaatcccagactggggtcatcgctaaacaattgaaaaacgcagccgtcgttgaaatcgatgagaagcaagacaacgaagaattaatcagtcattccaatggcgttgtcgttatcaattataaacaaatggaaaagatttaaaggattcataaagctacacatctaaagcaaagaaggtacgccgagtattgtggcgtactttcttttttttaaaaaaacgtgatcgaaatgaaatcgaccacgtttgttcttttattttgttccgaataaacggtcgccagcatctcctaaaccaggaacgatataaccttgttcgttcaattggtcatctaaagcagctgtatagatatcaacgtctggatgagcatcttgtaatgcctttacaccttctggcgctgcaactagacaaacaaatttcatgtttgatgcgccacgtttttttaatgaatcaatggccataatcgctgaaccaccagttgctaacatcggatcaacgatgaacaattgacggctgtcgatatcttcaggcattttgaagaaatattcatgcggctccaatgtttcttcatcacggaacataccgatatgtccaactttggctgccggaatcaattctaaaataccatccaccataccaatacccgcacgtaagattggtacgatcgcaactttcttacctgataacgttttttgtgtagataatgtgatcggtgtttcgatctcgatatcttccaatggcatatctcgtgaaacttcatacgccatcaacattgcgatttcattaactacttcacgaaaaactttcgttccacagtttttatcacgaataatcgttaatttgtgttggatcagtggatgatcaattacttgaaacttacccataataaattgctccttactcattttgaagtgttcatttttcatagagaaaaacgagagaaattttcatcggggtcccttctctaaagataatatagaaaaaagacatcctttattctgcatttctcctaattataagacaactagtgtcagaaaactagtctaatgtgattgaattggatgagattctgttaattctaatactgcctggcgaatctctaataatttctcttcatctccattagaacgtaaggtttcaattattaattctgctacttgttttgcgtcctcttctagaaaaccgcggctagtaatggctggagttccgattcggacaccactagtctctttaaagctttttgattcaaaaggaatggagtttttattaacggtaatatgcacactatccaacaattcttctgcttcacgtccagttagctcaaaacctgtcacttcaatcagaagcaaatgattatccgtagcgccagataccacacgagtttcaggtgcttgattaaataccttaaccattgcctgtgcattttttagaacttgttcactatactctttaaaatcaggagccaatgcttccttaaaggccacagccttagctgcgattacgtgttctaaaggcccaccctgcaatccagggaaaacagcactgttaatcttcttagctatatccgcatcatttgtcagaattaaaccgccacgtggtccacgcaaggttttgtgtgttgttgaagttacaacatctgcatatgggacagggttaggatgtaaaccagttgctactaatcctgcgatatgagccatatccaccatcaattttgcgtctacctcatctgcaatttcacggaaacgggcaaaatcaatcgtccggctataagcgctcgctcctgcgacaatcagtttaggctgatgtttccgtgccaaaatacgaacgacttcatagtcgatcgtctctgtatgagggtccacgccatagctaacaaagttatacagctttccgctgacattcaccggtgagccatgagttaagtgacctcctgctgacaaatccattcctaaaacagtatcgccaggctggatcaaagaaaaatacgccgcttgattggcttgtgaaccagaatgtgcttgcacattcgcatattttgcatcaaataattctttcgcacgttcaattgctaaattttctacgacatcaacaaactcacaaccaccataataacgtcggccaggatacccttctgcatacttgtttgtcaagacgctaccttgtgccattcttacagcttctgaaacgatgttttctgaagcgatcagttcgatattctgctcttgacgctccgcctcattttcaattgctccccatagttcgggatctagtgttttataatccatcccaacgccacctttcaattttctgatttaagtatacgaaagattcagcagataatcgaatcttttgtttacttttctccaaaatatttttgtgctgctgctttcttcaaccgattcatataggctaggcctaaatgatcctctggaaagacttcggcaaagattatatccgcttgattggcttcatccaatgccctcaatccgctgaataatccgcgagtggccgcctcaattgagtcgtcttcaaaaacaaagcgatctgctgaaggatagctatcagcaattttaggcgtcgctagtaaaccgacttttttcccgtttgtatcagcccaagcgatggcttttccccaatcgcccggtttaatcattaaaaccgacacatcaggcgaataatgcttatatttcattccgggcgctttcggtgtttcactctctttgactagatgtttgtctaaaggaacttcaatacccaaaacttcttccagtttttcttttgtcactgcacctggacgcaaaattgtcggcacttctccacttaaatccaacaccgtcgattctaccccgatttgtgttgccccatcatctaaaatcccagcaattttcccttttaaatcatgaaaaacatgcattgctgttgttggacttggcttacctgacgtattcgcacttggacctactaaaggtgcaccagttttttcaattaaagataatgtttttttattatcgggcattcgaaaagccgctgtggataaaccaccggtcacgaccgtactcaaactcccagctttaatcgaaaaaatcaatgttagaggaccgggccaaaaatttttaacaattttttcagtcaatggatgataactttccacaaattctttagtcatcgaaaaatctgaaacatgaacgatcagcgggttgtcgctgggacgtcctttgaccgtaaatactcgcttcactgattccggcaaaagtgcattagcacctagtccgtagactgtttcagtaggaaaagccaccaactctccttgacgcaatagtgctgccgcttgatttatttgatctgttcgataaatttttgtttccacagcttctccacagctcctttattctaactttcctcatttataaactttcttttctgacttatccccgtattgtggataacgcggttgtcaagtgtgtataaccatgttgataactttttttcttttttagcattgtcgcatcaatgttcttttattattttctacactaaaaataatttttagctaatgacaaccatccgatcatttcctgataaatcttgatggacccgtacatttttttcaggaaaggctttttgaaaaatttcttgaaccgctcgcccctgttggaagccaatctctaagaaaatcataccagctggctgcaaaagatctcggctttctgcagcgattttttggtagatagctaacccgtcgttttccgcaaaaagtgctaacttaggttcataggttcgaacactctcgtccatcagagcccattcactttggctgatatacggaggattactgatgataatatcttgtttttcattcattgaagatagtacatcacttcgtttgaaattaatttttgcatgtaggttttctgcgttttcctctgcgacatgtaacgcctcttgtgaaatatcaagagcagttacctgccaatctggtcgcgctaatttcaaactgatcgcaatggcgcccgttcctgtaccaatatctacaacttttttcctcttactttcagtcatagataagcataaagcaactaattcttctgtttctggtcgcggaatcaaggtatcttcggtcaccttcaaacggtgttcaaaaaaatattcatagcctaacaaatattgcggaggaatatttttcattaagctctcaatatctttctcaatcattgcttcatcatctggtaaaatatcgtttctcatattcatgagccattgcgtcttatcccaatttttgcgagccagaaaaagatactcgattgcataaccttcttttccgttagcttctaaaaaagaagaagccccagataggacttctacgtaagttttagccattttgcatctcttccagcttctgcgtttgatcatacataattagagcatcaataatttcatcaagcttgcctgctagaatctgatctaatttttgtatcgttaacccaattcgatgatccgttacacgattttgtgggaagttatacgtacggatacgttctgaacgatcgcctgttccgacagccgatttacggcttgcgtcatattcactttgcgcttcttgctgaattttatcatacacacgtgcgcgcaagattttcattgctttttcgcggtttttgatttgagaacgttcgtcttgcatcgcaacgacgataccagtagggatatgcgtcaaacgaaccgcagatgccgttttgttgacgtgctgtccaccggcaccagatgcatgataaatatctgtccgaatatctttgtctgcaatatcaatctcaacctcttcagcctctggcataaccacgacagtcgcagtcgatgtatgaatacgaccttgagactccgttgacggtacacgttgaacacggtgcgcgccactttcatatttcagcttcgaatagacgttgtcccctgtaatcatcatgatcacttctttgtatccgccgataccagtaacattggcctccatgacttccgtcttccagccttggttttctgcgtatttttggtacatattgaaaaggtcaccagcaaatagtgccgcttcatctccaccagcagctccgcgaatttccataataatgtttttatcgtcatttgggtcttttggtaacagaagaatcttgatctcttcttctaaaacttctttttccttcttcaaatctgacagttcttcttttgccatttcagccatctcagcatctaggttttcacctaataattcttcagcatcgctgatgccttcgatcacttttttataacgacgataggtttctactgtgtcacgagtattggcttcttcttttgacagttgcatgaagcgctgcgtatcgctgatgacttctgggtcactcagtaattctccaagctcttcataacgatcttcgattgcttgcaattgatcgtacatggataaaactcctcctaattcatattaatgtaatttttttgtcggctatgtctactaactattttatttagcaggattggtaatctctggatgtagataatgcttacggcaaacggggtaataggcctcattgccgccgatttggacttgatcgccttcatagactggacgaccatcaatgtaatgtagattcatcgttgcctttttatgacaaaaccagcaaatcgtttttagctcttccaatttgtctgcatacaatagtaagtattttgacccctcaaacatttcattgcggaaatcattttttaaaccaaaggccataactggaatgtctaaatcatctacgactttcgctaattgaatcacgtgttcttttgttaaaaactgcgactcgtcgatcaatacacagtaaggcttgtagtcaagacttttaataaattcaaaaatattggtctcagaaaaaatcggtacagcaggacggctcagtccgattcggctagagatatttcccacaccttcacgtgtatctaatccgctagtcatcaatactactggtttattttgttcctcataattatgagcgacttttagtatttcaattgttttaccgctgttcattgcaccgtatttaaaaaaaagctgggccatttcttgtcacctttcccttttgttcctatcgtattatagcggaaaagccagattatttacagtaataattttcattaatacctcatcttagaagaatcaatcattaatttcaacaaactcacaggctatctttttaagaatataagggcccagtgctatacttttcgttggtaattatttttattaatataaaactaggaggcattttcatgcaacaatctggtaaaaagaagcagcggagtttcccttctgcgtacacagttatcattattgtactgattttggttcaagcactaacattctttattccttcaggcaagtacagtacgttgagttatgacagcgggaaagatcaattcgcgattacagatgctcaggataaaacgatcatggagccggcaacacagaaaacattggataaatatgatatccacattaaagtcgacaaatttcgagatggcacaatttatcgtccagccgcaattcctaattcctatgaaagaatcaaaaagcctgagcgtggtgtggttggaactatcactcaatttttaaaatctcaggttcaaggaattactgaaagtgtcgatattatgatcttcattttgattttaggcggtgttattggaatcgttaatgctaccggagcgatggatgctggcatgatgcgtctttccgaaaaattaaagggaaaacaaaaatggctgattgtcattgtgactaccttgattgccattggcgggactacttttggtttagcagaggaaaccattgccttttacccgatcctaatcccgattttcttattggctggctacgacacattaacagcagtcgccacgatttatttgggaactgcgataggaaccatgagctctacgatcaatcctttctctacggtcatcgcctcaaatgcggcaggaatcagttttactgatggcatgcctttacgtattttgatgtgggtgactgcaattagcatctcgatcctttatacgattcgttacgcggaaaaggttcgtttgaatccagccgcatcattagttgctgatcaagcagaaagtgatcgtgaacgttttttaggtgatcaaactcgtgagaaaaatacagactttaccaatcgccaaaaattttcattgatcgtttttgctttaggctttgttgtgatgatttatggcgtgcagcaactaggctggtactttaccgagattgcagtagtcttcttagcagttacttatatactagtcttcgtctcagggttaggagaaaagaaattcatcaacagcttcgttactggtgctgcggatctattaggggttgccttgattgtcgggttagctcgttcggtcggtatcgtgatggaaaacagttttatcagtgatacgatcatgaacttcttcagcaatgccatcagcgggatgaacaatgtcgtcttcatttggtttatgttcctagtctatgtcattttaggtttcttcattcaatcttcctctggtttggcggtattatcaatgccaattatggcgcctttggctgatgttgttgggattgatcgtgcattgattattgatgcctataactggggacaaggcttgatcggattgatcgccccaactggattgattttagtttccttatcagtcgttaatattggttttgataagtggataaaatttgttacaaaattattaatcactattattatcttgatccttgctttcttagcaatcggtgttttaatttcatagcaacaaagcccgaatcctattcagattcgggctttgttatttctatatacttttgatgccacttcttatcgacttgccgtgaaccttctttaaaaaatattttttccgttcctgcttcattcgcaatttggtaataccattttttccaacgtaaaaaatcaagttgagcctgtaattcatggatttttttctctaagactgcctcttgctccaccataaaagcgtagcgctgcggcaaagttttatcaccttctacacaccaatccataaatttcgcaatttccttaacaggaattccagagcgcttcaaacaatcaattacttcgatataaccaagatcatcctcagtaaataccctgcgacctgcttgattctttttaacaaatggtaataggcccgctttgtcataatatctcagagtgtcttgggagataccatacatctttgaaatatcaccaatcaaaaaagatttcatttttttcaacttccttcttgatctggagttaactccaagtagtaaagtcagtgtatcatagttttgaaagaaggcaatttatatgaaaaaatctttagttgtaattacaggcgcgagttccgggtttggtgccgagatcgccaaactttttaatcaagctggcaatccgttactgttattaggacgtagcgtagaaaaaatcgaagcactaccattgaatttcgaaaatgtcatgattgaaaaggttgacgtaacagattaccaagcctttgactccagcatcaaaaaagcagaagctgtctttggcccagtagatctattagtaaacaatgctggtgtaatgctacttggtaatgtcttgaaccaaaatccagcagaatggcaaacaatgatgaacacgaatgtaatgggggtactaaacggtatgcaaatcgtattacctagtatgaccgagcgtaggcagggaacaatcatcaatatgtcatctcttgcgggtaagaaaacctttaccaaccatgctgcctatgtcgcatcaaaatttggtgcccacggtctaagcgaaacaattcgtgaagaagtttccggttcaaatgtccgcgtttctttggtcgcacccggcgctgctgaaacagaattacttacacatgtgactgatcaaggtgccctaacagattgtcaagcatggaaagaaagcatgggcggcattacacttgatccagttcatgttgctgagacagttaaatttatctatgacatgccacaggaagttacgattcgtgaaatcgacattgcagcgactgcgcaagacaactaatcaaacacaacctttatctcctctactcctaccaaaacggtgggagtttttttcacggaagcatgctatactatctctattgtaaaaaattcccactgttgattgaaggagtcttctatgaattttgatcgccgagtaagttttctcaaaaaaagctggcaaaagcttaataatcgattttcttcgattcaaatcatcgtcttctactatttagcgatgaccattctttctttgatcttgtttcatttaccaatttttcgtgaaccaggttcacacgtaccctttcttgatatgatatttatggccatttcgaccatttcagtgactggtttaaccacctttgatatcaattcagtctttaatgatgctggtgttttgatgctcgaggtgttattccatattggtggtttaggaatcatgatgattactaccttcttttttatcgtgtccaaacgtcggatcacgttaaaacagcgacaactaatcatgaccgatatgaatcagccgcgccttagcggaatcgttaatttgatccgaattaccttcactatgctactggcgatcgaagttcttttcggaactatcttttcaatttatttctatttagcaggctattaccataaaatctctgaagccgtttttttcggattttatcaagcgatctctgcagtgacgaactctggttttgacgtaactggtgaatcgatcatccctttttctcatgatgttttcttcatcgtgacaatcatggtcctgatctttattggtggaatcggattccccgttttaatggattttcatggctggatttaccataaaaaatctaaatcacggctgccctttcgctttagtctcttttcgaaaattgccctattggctttcttcgtactttttattggcggtacagtagctatttggcttttagaaaaagaccacaacttcgctcacatgaatctgtttgatcagtggttaaattcgtccttctattctatgacaactcgcaatgccggattgcaaattcatgatttgaatctatttcaaaatacaaccttgattattttctcattattgatgttcattggttgctctccaagttctgtcggcggcgggatacgtacaacaacgatcgcaatcatcggtctatatttgtactcattcttgaaaaatgaaaatgacatcaatatttttggtcggaaaatcgcccaagaggatgtgcgaaaatcggtggtcgtcttcatgctttctgctggaatgtgtttgtttagtattctctttttaactgcaactgaagatcattcgctaatctccattattgtcgaggttacctctgcttttggaacgactggactttctttaggaatcactgatgacctttcaaataccggaaaaatcatgatcgctgttttgatgtttatcggacgtgtcggtatgctgtataccctgatgctctttgttccaaaagaaacacaggacttaggctatgaatttccggaagaaaagattattattggctaggagcaaaactttgccctagctttttctatggaaaaattaagaataggaaaacctatttaaactttttttttaaatatgataagatgaattaaatttgttacagacatggaggatgtgtaatggggttacgaagtcaagtggctatttctgccggaaagactgcccaatgggtattaaaaacgttctttaaaggtggatccagttatcctggtcagcttgcattaaagatggatccgaaaattttagatacattagtaaaagattataaagtggttgtagtgacgggaaccaacggaaaaaccttgactaccgccttgaccgttaatattttgaaacaagaatttgattatgtattaacgaatccaacaggtgccaacatggtccagggaatcgtatcaacttttttaaacgccaaaggaaaaaaaggcggcaaaaaaattgcagttcttgaaatcgatgaggccagcttaagcaaagtcacagaatacatcaaaccagagctatttctatttacgaatatcttccgcgaccagatggaccgttacggtgaaatctatacgacctacaaattgatcgtggacggcgcagctaaatcaccaagcgccccgatattgtgtaacggtgattcaccaatctttaattcgttggaaacagtcaatccaagaaaatactacggtttcgatcatttacctgacaaagaccaagatgcccattacaatacggacggcttgctttgtccgaaatgccagcacatcttaaagtacaaaatgattacctatgccaatctgggaaaatactattgtccaaactgcggcttccaccgcccagaattagattacaaattaacggagatgaaagaaatggataataaatcttcagaatttgtaattgatgggcaagattacaagatcgaagtcggcggtatgtacaatgtatacaatgcccttgccgcaactgctgtagcagaatactatggcgtttctaaagacaagatcaaacgcggacttggctatgatgaaaaagtctttggacgccaagaagaatttgtaatcgatggtaaaaaatgcacgctggttttagtaaaaaatccggtcggcttaaatcaagtcatcgacatgattggtttagctccctatccattttcattggtttctctattaaatgccaattatgcagatggtatcgacatcagctggatctgggatggcaatcatgaagcttttgctgagatggacatcccggcagtgatcgcaggtggagatcgccacgaagacatggcccttcgtctgaaagtcgcagggatccctgaagacaagctgattgagacggcagatttgacggacgtgattgaaaagatcaaactattgccgacggagcatgtgtatatcctagcgacctacacagccgttttacagctacgcaaagaattagcacaaaaaggctacattgacggaggtatggatcgtggctaaatacgagttgaacttagcgcatttatacggaaatttattgaatacctatggcgacaacggcaatctcttaaccttgaattattatgccaaacaaatggacatcgagattcattcagagatcgtcagcatctatcaagaattcgatccagataaatacgattttgtctttatcggtggcgggcaagattatgaacaagtaatcgtatcaaaagatattcaagataaaaaagaagacttgattaagtacatcgaaaacaacggggtcattctttcaatctgtggcggctatcagttactgggccactactatattggtgcaaatggagaaaaaatcgatggtatcggtgcattggatcattataccctaagccaagacaaccatcgtttcatcggggatatcgagatccataacgaagaatttggtgaaacctactatggctttgaaaatcacaatggccgtactttcttaggtgaaggtgaacgacctcttggtacgatcgttaagggtaatgggaataatggcgaagaccaaggtgaaggcgtcatttacaaaaatgtttatggctcatacttccacggtccgatcttagctcgtaacaaatcattggctgtgcgcttacttcataccgctttaaaaaataagtacggggaagatgttgatctgccagaattaccataaaataaaaatgctcatccgcgttagtcggatgagcattttttgtatatgaaaaaatgagacatttactattttgttcctggagtggaagcgatgattttcatttcgccttcgactttccactcggttatttgtgctggtaaaatgcaacttgtaccaggcttcatttcatagctttggccatcaacgatcaaattaccatatccttctacgactgtcaccaacgtataatcgccttcttttttaagtgaaagctcaccaataacatcccattcgtaaacattgaaaaaatctgtcttcaagtacgtgatcacagaagatgttccctttttcttttcagtaacttctaactcgggactgatcgccggtacagtggttacatcaattgattgttggatgtgcagttcacgtgtgttgccttgatcatctttacgatcatagtcataaacgcggtacgttgtatctgaactttgttgtgtctctaaaatcatgatgcctttaccgatggcatggatcgtaccacttggtacatagaagaaatcgcctttttttacaggtacacgacgcaataaatcatcccaacgttcgttttcaatcatttctgccagttcttcacgagatttcgcattatgtccataaacaatctctgaaccgggtttggcattaatgatgtaccagcattctgtttttcctaactctccttcatgtttcaaaccatagctgtcgtctggatgaacttgaactgataaatcgtcttcggcatctaaaattttagttaacaatggaaatacatcaccttctgctttaccaaataattcacgatgctcattccatagatcgctgaccttccaacccttgtaagggccattttctacgatgctaacgccatgtggatgtccgctgattgcccaatcttctccaattttgtcgttagggatatcaaatccgaaaaccgtatgcagctgatctccgccccaaattttttcttgaaaaactggttgtaaaaataatggttccatacttcttgctccttttttcaatttttttatttcgctctaagcaagctgcgaaaagataatcatttcaagttaataaaagcaatcgcctgtactatttttttaatcgttccatacgttcgctcagatagcaggccaaaatctcatcacggtgaaccacataactagcacgatgatcttccgtgtgaacgcgattcgacaaaaagatgaatgctgattttttgacgacatccaatagcatgaatgttccagtgtacccagtgtggaaaagtaatggagtgtgatctaacgggctgaattttaaatcccagccaatcgaacgttctccttttcctgttggtgtttgatcatgaagcaattcttgaattgtcttatcctgcaaataaatcatatcgctaacaaccccaagattcaaatacatttttgcaaatttacttaaatctttcatattcgaaaacagacctgcattgccagcatgctctgctaatactcgggcttttggatcatgagtaaggccttttaaaatcgttccatctaccaatttttcagtgggaacaaccttatcatatggcggctgcagtaaaaaatgactattggacatactaagaggctgtaggacttcctgcctaaagacatcaattacatctttttgatatagtttttcaagcagaaatcccaacaaaattgttcctgcatcagtatatttaacgactttccccagatcttctcccggttgtaggcttaaatacgcagtccgtaattcttcagcatttaactgatctcgatttggaatataggtttgaatatctgatgtatgagtcaataaatgacgcaacgtaatcgtttcattttgaaattccggcaataagctgtgaagagattgatcccacgtaaccttgcctgcttcctttaatttcaacataacagttgtcgtgcagaccactttcgttaaggacgccacatcaaaaaggtaatcttcctgcatagaaataattgttggttccacttgtgcatttcccataacttgaacttcagtttcctcattttcgacaaagctaagaactgctcctggaaaaacagctttttgcattttttcttcaattaattgaaacgtttcagggtacataacaacctccgtaagtaataattctaaaagagtatagcacaaaatgattaatcaagacttctgaacattttttaaaatacgatttactcaaaggaaaaatttagaggtaaaatcaaaaaagccgcgatttctcgcgacttcattatctttacttcaatacgaaccaccattcaattccggctgcatcataaatcgtaatcaaggatttctttttatcaatgaagtaattgaactgcttattgctgagatgttgagacaactccaacagtttcgttttcgaaactttaaattgcaaaaagtccaagccgagtactttatcggtaggtaaatcaattgcaccaccgtttgcagtcgttaaccctacgttaaaatctccacgattcaacaacaattcttcttcactttcatcgtgaacttgcaaccctagaatatctgctaaaaagctttgctgtttattcagatcactgacatttagatgaagcttatcaaaataagctccgtggattttttcacgcttagttgctttttttgctaattcattaaaatctaattcaactggttctgaggtggaacgttctttactaggagcaaagaaaatttcgatttcatttccttctgggtcttcaaaaagcagccctttttcatcatcagcttgtaaagcagatttaacaggataattttcttctttggcacggtaataaacgtttgctaactcctctaaattgggtactactaatgagacccgttgcatttttttgatctctccgcgatgctcatctgctcgcggactttcctccagccaaagtaattcgctagccggatctttgtatccaagaatcgccaattcgttttcttcacgcagcaagtgcagtccgatgatatcgcgataaaaatgaatcatgccatcacgatcacgtacacgaatagcaattgttttcaaactaagtttccctaaatgaaaattttccattattctcttccctccgtcactactattctaacgatgccttctgattcacgcaagtaatatcttccctaaaaaattctgcaattattttccaactcaaaaaaaacttatccaataacaaaaaaatgatattttcactaaatccatgaaaaaaacttgtcaactttttctagttttgaaatttttttgaatgttagctttactttttgtcaatttcaagtaaaatgtctatgataacacttgtaattagacgataaatacattaacgttgtaatcactattaagaaagaaaaggctgttgaaaaaatgaattattcggtaacaacaaaagaatttatgctacttgctgctaaagaacccgtggaagttttagacttgagagaccctgactttattgactcctttgatttacccgaaggatcaaacgtaactcatatcccgttgacacaattgccaaatcgtttggaccaacttgacagaagtaaaacgtattacctatttactcaattcggcggtcgttcaaaaacgatggcgcaatttttaagaaacgaaggcttccaagtcgcaaatgtgattggcggtaccactgcatataaacaatatcttgcgagttaacaaaatctaattttaaccaaagcttccaagcagataaattgtctgctttggatattttgtgtacgattcgtttgtaattaaatttaaggagtgttagttttggcaaatgttctagtagtgaatgctcacccgttatccgcagaagactcacaaactgtcactattctggatacttttattgaagcacatcaagccagtcatccagaagatgtattcaccatgttagatttgtattatacagatctccctgagattgatggcgacttactattagcttggaaatcgttacaaaagggaactgattttacagaattgagtagtgttcagcaagaaaaggtgcgcgttttcaatgaatttactgatcaatttttagctagtgaaaaaatcgtcatcgccaatgctttatggaatttgaatattccaacgaagttaaaagcttggttcgacacaatcaacgtcgcaggtaaaaccttcagatatacagcagaaggtccaactggattgattacagataaaaaagctcttcacatacaatcaagtggcggtacatataacggtcaagatttctcagcacaatatgttaagggaattttgaattttattggtatcactgattttgattctatttacattgaaggtgcggattatgatccagcaagagcacctgagattatggctgcggcaaaagaaaaagccaaatcattggctgcacaattttaaaaaaatgcctgtcgattattcgtcgacaggcattttttctttcgcttcgtcttcgtacaagttcgatacccctttgtaccactcaaatacatggattgcaataactttcgccaccgcataaaatggaattcctaatataactccaacgattccaaagattttcccagccgtcaacaatacaaacatgattgtgacaggatggatttccaattgattccccaatactaaaggtgagacaatacgcccttcaattgtttgttcgatcgcaaaaacgataatgacttttacgagcatgattggcccagtgacaatagcaatgaagaccactggcaccattgctaagaaggagcctaaataaggaatcaaatttaaaaatccagctaaaatacctaaagtaatcgcataattcattcctactaaagaaaagccaataataaacatgacggctaccgcaaaagctaccgttaactgcccacgaatatatgaagctaactgcgagttcatttcagtcatgaccttaagtgtcggctttcgtgcttttgtcggcaaaagcttaagaatgtaaggcgctaattgatcgccatcctttaacaaaaagaataaaatgatcggcgctgtaatcaacgcgatcaacactgtagctagcgtagaaacaacacttcctaatccttgcagtgtaactcgtgaaatcttttgcgcagtatccgttaatgactctaagattttctgcagactattatcaatgtgttgttgaaacggcttgaaggcagggtccttaaaaatatcatttaatttatcacttattgtgtcaaagtagctaggtagacttttcatcattgaaccgatctgctctctaatctgcggaataatcactacaattccccaaataagtaaggcaactaccgcgatgaaaagcagtacaatcgcaaaagtccgcttcagtcctttacgctccagaaaattgaccacaggattcatcaaataatagagaatacctgcgattaccattggaaggccgacgatcgcaaagaattgacccaccggctcaaacaaataggatacttttgtaaagactaacgcgatcaacaacagcagcaatacaatgatcaatgctacaactacctggctgtttaaaaaccatttccaaaaccaagaggttttttgcgttaatttctttttatccactcactcacacccctactgaaaggtaattttcatccctacttccaagtctggaagcttttctggaacaacatagatcgcatttggaatcactccagcttctttctgaaagaaaactgtcgcatgtccaatttcatttaaattttgattggctaaaggtcctaccccaattacctgataagcctgatccccaaagatcaattgtccacctttttctaatacaattggttcatcattaatagttttttgaacaatcgaaacatctaataagtctggtgtaacactttcaccaaaaagcaccaagatattttcatcgttaatcgcattttttccaatttgagtaatttctgtttcagtcataggtcacgctcttttcacatttatttttcaattatatcacaaagttagcgctatccaagtgagaataaacttgttaaaatgtagatacattgaaggaggttttttaatgatccacaaaataattttaggtacgtacacacgacgcatcagtcaaggtatttatcagatcgaattagatacagcgactgaaacgttaaacaatttacaattagtaacagaagaaaccagccctacctacttcgcaaaaagcaaagagggctttctttactcagtcacaagtagagatggtcacggcgggatgtccagttacgatccacaaaacaaatttttgaatgcggtgacagaagaaggcgcttcaccatgttacgtagctgtcgatgaagcacgtcaacttgtttacggcgccaactatcataaaggggagctgaatacctataaaattctgccggatggttctcttgaatccgcagctgccctttttcataaagaaccaacaggtccacataaaaatcaggatcacgctcatactcactatactgatcttgcacctgatcaacgcctcgttgtatgtgatcttggcaccgatcgcgtctacacctatgatgtttcagaagctggtgaggtcgaagaagtagcagtctatgtagcagaaccggggaccggtcctcgtcatttggtttttcatcctaataaaatgattgcgtatctatttggcgagctggacagcagcgttaccgttctaacgtatgacgaagcagatggcagcttcactcaaacacagaaagtctctactttaccaaaggattttgatggtgaaaatggcggtgcagcgattcgtgtatcaaatgatgggcgttatctgtatgcgtcaaatcgcggacacaactcaattgctgttttcgcaatcgctgaagatggcttaagcattgattcgatccaaaccatttcaaccgagggagatttcccaagagactttgcattgagtcctgataattcatatgtagtcgcagcaaaccaaaacagtgacaacttaaccctttatcgccgtgatagcgagactggtcttctaagtatgattcaaaaggacgtctttgcaccggaagctgtttgtgtctactttgattagtagacagcaagactctactatggaggtagtacttatgaataaagaggaagttattgaacgattgaaaaaagatttggatttgccaaattttaaaggacgcttagaagaaaaagaatataccgaagaagaatatcaaaaaattaaaaatgatttgaatgattacttcgaaaattatgtacgaaatatcgaaaattaaacaaaatgagagctgactactgagtatttcactcgatagccagctcttttgatattttgctaatcagcgatagaaacgtaattcataattatagaaagatttcttctatcataaaattttaaaatagtttcgaaatcattttaatttgctacgctactaaagtaaaaattcaaaaaaagaagcaccgatcggcaaatcggtgctaaaggagtattacctaaatgcaatgaaaaagaaaaggttgttattggttatgaactaataatactcgatccttcttcatctgtatttaaaataacgttataaaaaaattagaaaacctttgttctttttgatatttcacttgtttactatttcaataacagattggttattttttgaatcgttttgtagattgtatccgttgcagcgtcctgttttttttcagctgcattgaaggcttcctcatttacttccggtaacaaactatccgtcatttcttgacagccagctacatattgaatatacgccttttcaaagcttttatggtttcccattacttttgctggtgcctttaacataccgattttttctaaattcaattgataaaactgtgttccctctttaaaaagttcatggatttctgataaacgttcttggtcaaaatcagccattttcttttcatctaaagcagtacgaatctcttcatagcttgggtgcaaacgctcacccattttttccgtattttgaacgatttcgttgatttctctagcataaaaccctgtattaggtcgcattcatttattcctactttcttttttaatactttcattttaccgatttttgcacaatatgcaaagtagctcagaaaatattaaaaattgcttcatttattatttatttgatgataccttaaaagaaatacgttttatagggggaaaacaactatggactggatcataaggaaatggcgcaatcaggatgctaaaaatttagcgaatgcgctaaacaataaaaaaattcaagcaaatctgcgagacggtctgccttacccttatactgagcaagacgccgcagattttattcaaagcatgctggaagctgatccgaacaaaacctttgcctttgcaatcgtgaatgacaaagatgaagtaattggaagtataggtgcttttcgttgtgagaacatccatcgtctaactgctgagatgggctattacattgctgaagagtattggggccaaggaatcggtacaaaagcaatcaaacaactcacagaccacctttttagcgatactgatatcattcgaatttttgcggaacctttttcaactaatcatgcatcttgtcatttgttggagaaaaatgggtttcaattggaaggtaccttgagaaaaaatgcaataaaaaatggtgtattactagatatgcagatgtattctttgatcaaatagaaaactcgcatgaagcaacattaatgccttcatgcgagtttcagactgtagacaaaagctgttccaaactcgtaactcgagcttggaacagctttttatctacttcgtttcgaatttttgaacaaaaaaataaaggctccttgcctttccatagccaggtggctaatttctttaaattcattgcagcaaacactagcatcgtatgcgtcgcgactttttccaagcctcgatacttggtccaacgcatcccatgcttttcttttgcatctgcaaatattcgttcaatcgtttgtttccgttttttgtaaattgatttattcagatccgttaggcgaagatgttccacttcatccatcagatctccccaaacatgtctcgtgatgactcgttgatgatttttacttttggtacattggtttagcagaggacagttcacacattcttttggattggatttgtattctcggtacccttctcgagtaaccgttgaaaaagcgagcatttgatcctgcggacaaatgtaacaatcataatactcgtcatagagaaactcgttttttgataatagcccttttttccctttgggccttgaataaggcaaacaaggtcgaagattcaaatgagtcaaaaagtgaacaaacttaggtgtcttgtacccagcatcagcgacaacacagttgatttcaggaaaaagtctcttcgattgtttgacgagctgaaaggcgacttgactgtcatgaatatttccaggagtgatgattgtgctaagaataaatccgttgtcgtcacatgaagtatgggcagaataagcaaattgtttttctcgttcgcctttgacgtagtagccgctttccggatcagccttacttatttttctttctttcagcttcacttccttttctaagtccaaagtaaaagggcgttttccggcctctattcgttgacgattgatctcatcttctaattcatcctgataggctttcgcttcatcgtgggtcatttccttcgtaaacttatgtttattggcgttagctttgatgtgggtagaatcaagatacaaattatcctctgttacaaaacctgctttaactgcttgttctaaaatataggcaaaaatatcctcaaacaccgtcgtttctctaaatcggcggacataattctttccaaaagttgagaaatgggggattttctcctcgaaggaatagcctaaaaaccagcggtaagcgacattggtatcgacttccttaatggtttgccgcatggaacggataccgaataaatactgaataaacaccaatttgataagaatcactggatcgatacttgggcgacctaaatcggagtaagtggcttcgacgattggataaataaattcaaaatcaagcgcggcatcaatctttcgaacgagatgatcttgaggaaccagatcatcaatcgtgagcatcgcaaattgatttctaccgttcgtattgtttttagacatcataactatcactccttgcattcgttttcataaatctattataaaagaaaagactgtagacatcatccataaaacggactttgtctacagtctgaaactcgcatgaagcaacattaatgccttcatgcgagtttttatggttctataatattttgtgttggtggaaaatcgaaggcgattttctactaacacttttttcttcgtttcaactcaaaaagagactcacttttggtaaaatttagtcgaccaaaacgtcaccctaccaaaggagtctctcaatggataatcatactagaaaattactcggattaacagataaacatttattttttgatgaagaatggctgattgaaaaagaatataaaggcgttcaagcgcagtttattaaaggaaaattggatgactctccttcctgttgtgaacactgtcgatcggttcgtattatccgcaacggttcctatacgacacgcactcagatgttgaaagtcaaagaaaagttaactattttagaattaaaacgtacccgttttctctgccatgattgtggacggaccttttctgcgaaaacggacttagttgatgaacatcatcaactaacaaaggaactgaagcaggcgattctcatggaactgtacgaaaatcaatcacgtaaactaatcgctaagaagtacttcgtctcggatgggacggtgacacggatcttgcgtgaagcaacgaagcattaccagccacgtatgaacttccttccgacggtgttgtgtatggatgagttcaaatcaatgaagtctgtttctggttccatgagttttatttgtgttgatgggacaaccaatcagctatttacgatccttgaagatcgcagactttacaaactaactcaatacttcctgcgctttcctagaaaggcccgtttaaaggtcaagtacctagtgatggacatgaatgccagctattgtcagttgcttaaaacggtctttccaaatgcggagatcgtaactgaccgctttcatattgtccaacacatcaatcgcagtttcaatcaattacgtgtccagatcatgaatcgttttcgaacctcacactctgaaaatcagaagaagtaccgtcggctcaagcgatattggaaactcttactcaaagattccacgacattggagccactcaaacggcattatcatcgactgtttaaacgaccaattagtcaaacagaaatcgtcgatgaactgttaagctacaacgaagaattgcgaacagcgtatcatttttgtcaattattacgctattatttcgttaaacgagatacggaaggctttcaagaaacccttaaaacaatttcatctacgttacctcagtcgtttaaaaagaaattcacgatcttccatcgctaccaatcgggcatttcaaatgcctttaaagtgtcccactcaaacggtgtcacggaggggctgaataacaagatcaagctgattaaacgaattgcgtttggttatcgcaacttttataactttcgggcacggatctatttacaacaaggtctgatctttgaaaactaaaaaaatatgcggcgcacagaacgcgccgcatatcggactaagttttattcaaatttgtcttcaccaacacgatttgacgaagagccgtttttatttaaactattttttttgtgcacttcgttggaaggctttaacaatttcaacaattggaataatcgcaaaggatgccccaattacaatcccccattgataaagatcaagatgtgctacccggaaaatatcattcaaacctggtacaacaataatgatcatcattaaaacaaaggataacaagattgcccagttaaagctcttgttgcggaatggtccgacctggaacaatgactgatgaacagattttacgttgaaggcatggaatagctgcatcaagcctaatgttgcaaatgccattgtcaaagcatcagaatggatttctgcatacgttgtatgaactggccactgaattgcggaccagtaaacaaatagtaccgtacctgcttctaatatcccttgatagataatacttgataaaacgcccccagaaaacaggtttgaactacgcccacgaggattatgcttcatcaaatctttttcagcaggttccatccctaatgcaatcgctgggaaggtatccgtaactaagttaatccacaataaatgaataggtaataaggtatcccaaccaagtaaagttgcaataaataaggtcaatacttcacccaagttggctgctaacaaatattgaactgctttttgaatgtttgagaagactttacgaccttcttcaactgcaacaacgatcgtcgcgaagttatcatcagcaagaaccatatcagaagcgcctttagaaacctctgtacccgtgattcccataccaataccaatatccgcttgcttcaaggctggcgcatcatttacaccatccccagtcatagcgactactttaccttctttttgccaagccttcacgatccgaactttatgttctggagaaactcgagcatagacagaataatgttcaactttctgagcaaattcttcatcagacatttcgtttaattgcgcaccagttagaacagatgcatcatcacctttttcgatgattcctaaacgagcagcgattgcttcggcggtatctttgtgatcgcctgtaatcatgattggacgaacgccagcttctttcgcaactcgtacagcttcagctgcttcagcacgttctgggtcaatcataccgactaaaccagcaaaaattaaatcattttccactacttcagattctaattcaaccggaacaacatcgacatatttataagccatgcctagaacacgtaacgcttgttgtgccatgtctttattattagctaaaatatcttgtttctctttgtcagtcattggtacaacttgaccattcaataggatttgcgacgtacgaccaagtagcacatcgggagcacctttgacagcaaccagaattttaccggttccttcttcgtgtaacgtactcattaatttacgatcagaatcgaaaggcaattcgccgacacgtggttcttcagctactttttcacgaacatcaaaagcattatttagcccaaattgtaccaaagctgtctcggttggatctccaattaagccaccttcttgggtaaacttcgtgtcattcgcatagttcatgactttcatcgccatactatctactggtacttcaccatttgcatcatattgttgattgtctacgtataatttttcaaccgtcatctgattcaaggttaatgtcccagttttgtctgaagcaataatatcagttgaacccaatgtttcaacggctggcagtttacgaattacagaatttcgttttgccattacttgcgttccaagagccaagataattgttacaatcgctggtagcccttctggaattgctgcaaccgccaacgagatcgaagtcaacagcatatcaacccaagatgtatcgttgaagaaaatcccaacaaagaacatcacgatagcgataataataattgcaaaggtcaagaatttactcaattggttcaaattcgttttaagtggcgtttctgtctcatctgcttgtgctaacataccagcaattttaccaacttctgtattcattcctgtgttaacaacgacacctttacctcgaccataggtcacattactatttgaataggccatattgacacgatcgccaataccaacttctccgtcttcaatcacaatcagttctttttctaccggtacggattcacccgtcagtgctgcttcttcaattttcaatgaagcaacttcaatcaaacgcaagtctgcaggaacgacatctccggcttccagcatcacgatatcaccaggcacaagatccgttgattttactgaactgatatgaccatcacgtaaaacattcgcatttggtgtagacatttcccgcaaagcttcgattgcttcttcggcctttgattcttgtaccacacccatcacagcattaatgataacaacagctaagataatgatcgaatccactacttcatgagagacgaccgcagatataattgccgcgaacaataagacaatgatcattaaatctttgaattgttcgataaaacgagcgaacatacttttcttttcgccctcttctaattcgttcaaaccgaactcacttaagcgtttttctgcttcagcggttgttaatccttcttccgtcgtttgaacttctgctaagacctgttctgtttcctcagtataaaaaggctttagcagttgttgttttttctcctctgacattattatcctccttattcgtttcgaatgtcgtataccattcttccaattacgctagtctgctcttaaattatggtgataaattcttaaaagaacttatctggaccttcgaagacatatcattctactattctgctaaaacaggaagttgaactgacaaagcgtatagaaaaactggcaaagttgaactgacatccttaaaatgatgttccttttaggaataaaaaaatagacttgtgtatgcgaaagacacatacataagtctcactatttaagacaacaccagaaaattgcttttcttgctggtggcgttgccacagcttgcgctgctagttactccctcatgaatacaaaatgaattatagcatgagaaaaggctggaatacaattactacttttcaattaatgaattgtaagagtttccagcagagacttttgtccaaaaatcttcagctgttccttgttccatgcccattataaacttttctcggatatctggatagtttttagcaagctgcgtcaccaagttcttgatttcttccctttttgtttttttatccacagggcaaggattaaaaattacagggagttcttcacgtttcacaagtcggataatttgtttctcctctaaatagatcattgggcgtactaatgtcaccttcgtttttgataaatagctttttggttcaaaactgtttaaacgtccgtgaaacaaaaaattcataaagtaggtttcaatcgcatcatctacgtggtgacctagagcgactttttggcaccccaactcacttgcgcgattatataagattccacggcgaagctttgcgcataaagaacagggcgacttttcttcacgtacatcaaaaacgactttcgcgatatttgtcggaactacctctaattgatagcctaagttttcaacaaattttttcatcggagtaatgtcacagccttcaaatcccatatcaagagtaatcggtacaatttcaaagtcaaaacctaaacgccgttgacgtcgaatccgatctaataaatagagcaatgtcgtgctgtcctttccgccactcattccaatcgccactttatcaccaggctcaatcatttgatgagttaaaattgcccgacgcagtggattgtaataattctgattgtctttctttttaaaccccatatttactcctttaatctcgtgtttattcaaaaaaattttctttcaagctatactgatgaccagctgtaatgtcgtattgaatcatttggtattcctgataaattttctcttgcttttgattgaaacgagcttctttaaaccattgtccactttggtagtacattcctttttcaaaggcaggaaactctttttgcaaagtcactaataaattttgaaatccagtcatttgaagtctgccctgttggaaaagatctgctgcaaaataaaagggacttgttgtaacttgctgtctattgagtttatggcgattgtcatacatcaaaaattctgtttcatgtagtaagtgcccttggtttttcttttgaatatcgtctgaataaattcctggcaaatgatccccccaaaaaacaaccaaggttcgttccggtagatcgtctaattttttcagaaaatccttcaacgcttgactactgtatgcaatatcctgcaaatatgcccgaacagataagctatcatcccctttgactaagtaaggaatgttcgagtatttattttcgtacggcatatgcgtttgcattgtcactaaatgcaaaaattgcggctttttatttttatctaattgatcaaagatttcttgataggctgctgcatctgaaatatacggattattttcaagtttatccgtatgcttcattgttttttcgtccaagaattgatcaaacccaaatgtttcatagacatcttttctcttgtacattgaagtattgtaaggatggattgccgtcgtttcgtacccgcgttccttcaatgttccgaccaacgaaggaaatgaatcaaaatccgacatcagcattgtataaggcgtagtcatctgtgcattgaatagctccatggaaaaacccgtcaaggcttcaaattcgatattcgccgtcccaccgccataattttgcgatagcatctgaccactataggtttgatcggcgattgtacgataatcttgcagtggatccccacctaaaatttctaagccattcaaacgacttggatcagaaaaactctcactcataacataaataatattcggtttttcctctgaagttgtttttgcttttttttgatatttcttagtaattctttctacgttcacttgagaataatccgctggcttttccatcgcctccaccggtaaattatacaaaaagccacccataaacccagtgttgtaataattcattttttgactgtagggaatccataaagccgttttattataagccttgcgcaatagattcccttgctggttgaatccaccgatatacagcaacaaactgctagttaaaacgaaaaatataaaacgcagccgttgttgttttttctctaacttccagcttttcttcaaactaaagagaactaaaataattcctaacgccaacatcagtaaaaacagaagaaataatggaagaccaatcatgtcgtagatcattccgaattcagtaatcattttcaaatcatttggatagatcggctccatccgatagttcatcttcaaataattcgcaattcctacaccaatcaccgttaaaagataaaatacactacccgatttcagtgagcctaaaagactgctgacccacccataaaaaataagcagtacaaagcaccctaaaaggaatttttcagtgtgccaagaaaaagcaaatttgaacattaattcaaaggaaaactcattttgtgttagttgaaaaaaaagatttgaactaacaattaatcctatcacaccaataatttttaacagctgttgccaaggaatctttcgaagtttgagcatgtgtctctcctatctatggatttctaaatcgtattaatccttttatctttaaaatacgaaatatccttccaatgcccttcgcacatatctttcagccagtctatataagcttttgaattggcaaggcatcttaaatagtttagcgagaaattagaagaaagtaaagaacgataagtttacactaaaatcgttggataaaacaaaaaagtctagcagagttgaagctccgctagactacgattaaatttactatttccaaaaatcatcgaagatcgtgattggtaaatggcgtttgtgctgcgttttattccaccaattttcaatcgttgcttgcgccttttcgtcaattgacttaccttctaagtagtcatcaatatcatcataggttactcctaatgctacctcatcagagattaatggcttcccatcttctaaatcagccgtcggaaccttcaaatacaaagcttcttccgctcctaattctttcaacagcattttaccttgacgtttatttaagcggaacagtggtaaaatatccgcgccgccatcgccaaatttagtaaagaaacctgtgatattttcagccgcatgatctgttccgataacagctccttgattgccgccagcaattccatattgagtgatcattcgttgacgtgctttaatatttcctttgttaaaatcactgattgcaacaccagcttcttctaatgcggcaacctccgcgtcgacagcttccttgatgttcacgcttaagctaacatctggattgataaaatctaatgctcgcttagcatccgcttcatcagcctgagaaccataaggcaatcgtacagcgataaatttatacgtatcatcacctgtctcttgccgcatctcttccatcgtaagctgagcaagccgaccagccaaggatgaatcttgccctccactgattcctaaaacaaatgtctttagaaacggatatttccttagataatcctttaaaaactcaatacttttacgaatttcttctttgggatcaatggtaggtttcgtccctaattccttaatgatttcttcttgcagcttcatcataagcttcactcctttaatcttattgctctgtttttaccacagatctacgcacttggtccataattttgtttttatggttccaacacttcgtagaaagatcaactggatatttttgtggatttagatcacgtttgtattcttcccacagtgaatctaagctggctttagcagtctgcttaacttcttctaaatccggcaaatcataaataagcttgccatctatatagatgtctcttaagactggacgagcctcaaaatttttcaccgttttattgatatatggataaactggatggaacatataaatttctttctcttctcgtggatcctcatcccatagtgtgacataatcgccttctgatttgccgtcagttttacgtgtaatccgccaaacttgttttttaccgggagtcgtaactttctctgcattactagagagtttaatggtatccaccatctccccttgctcattttcgattgaaaccaacttgaaaacggccccaagcgctggctgatcataagccgtaattagttttgtaccaactccccaaacatcgatcttcgcatgttgcatctttaagttcaaaattgtactttcatctagatcgttagatgcatagatcttcgcgtcagggaaacccgcttcatctaattgttggcggactcgtttggaaatataagccatatcaccgctatcaatccgtacacccaagaaattgattttatcacccatttctcgagcaactttgattgcacttggtacacctgatttgatcgtatcataggtatctactaaaaaaacacagtctcgatgagtctcagcataagctctaaaaccatcgtaatcattgccataggattggatcaatgaatgggcatgggtaccgctatcaggaattccaaaaatctttcctgctcgtacattacttgtagcatcggctccaccaatataggcagcccgggtgccccaaagtgcagcgtctaattcctgagctcggcgtgtaccaaactctaataagggatcgtcaccaattactgatttgattcgagcagctttcgtagcaatcagcgtttggaaattcacaatgttcaaaagcgccgtttcaaccaattgacattggagtaatggcccttccacctgaataatcggttcattgctgaagaccaattcaccttccactgcagaacgaacagtgcaagtaaacttaaagtcacgcaaataatcaataaaatcggccggataatgttctacctctgataaataggccaaatcgctttcactgaaagttaattcttccaaatactttacaagtcgttcaagaccggcaaagatgacataaccattatcaaatggcatactgcgaaaatagcactcgaatacggaatgaagatctgctcgtcctgtctcccagtaagttttcatcatattgatctgataaaggtccgtatgaagtgtcaaactgtcatcttcgtacaactttttcatagtcatgctcctcatttgtttttagtaaaataaactatttcacttattatagcacaagaattccgaggcaacagtgttagctcttcaacataaaaaaatctatttaaaatgactactctatatctatttattgctggttggaaaaggaaaaaaagaaaaaggccttaagcctttctcgattcaagattattcttttggaattttatactccaccgcaatgatatctttataggattctttaggtctaagacccgcttcgataatttgttttttgtagccaacatctacggtaacatcttcacgatccacttttaacaatcgatgaataattgtatctacttcttgatgactgattttgcgcttacgattcagcaacaataaatcaattgtatcaaagcggtcagcgtaaatgatcttcgtccgatcatatgcaaataatttaagcagctttacagctgggcgtttatcaaaaaaatatttggttagattaggatacagtgtttctaagttaacattactattcaacggtgtttcgattaatttcattcaacattctcctatccctacatatttttattctataagactgatatgttttctttataatgatattttaccatatgaagcaaacgttttttaatgaataaaaaaaatcttataaaaaagaaatagattgataaaatcgccttataatcacttgcaatcaaaaaatatattctgcttaatttgtttttttaaagatatagaattctaaaaaattatagaattcatcagtccatttagaaaaaaagccaccggaaattttccgatgactttacgtcttatgatgaactaattacatcataccgcccatcattgatgggtccattgctggtgcagcagcagctccaccttcaacaggtttgtcagcaacaactgcttcagttgttaatagcaacgcagatactgatgcagcattttgcaaggctgaacgagtaacttttgttgggtcaacaatcccagcatcgatcatattgacatattcacctgatgctgcattgaaaccagttccttgatcagcatttttcaatttatcgattacaactgaaccttcaaagccagcattttcagcaatttgacgaactggttcttctagtgcgcgtactacaatttttataccagttgcagcatcgccttcagcctctaattcagatacttttttaataacattaactaaggcagttccaccaccagatacgattccttcttcaacagcagcacgtgttgagtttaaggcatcttcaatacgaagttttagttcttttaattctgtttctgtagccgcaccaactttaacgactgcaacaccgccagcaagttttgccaagcgttcttgaagtttttcacgatcaaaatcagaagttgtttcaccaatttggcgtttgatcatttcaacacgatcattcaatgcagctttatcgccagaaccttcaacgattgtagtattatctttgtctacaacaactttaccagcagtacctaagttttcaattgttgcttccttaaggtctaatccaagatcttctgtaattacagtagcgccagttaagattgcgatatcttcaagcatagctttacgacgatcaccaaaaccaggagctttcactgctaccacattaaatgttccacgaattttattcaataccaatgttggtaatgcttcgccatccacgtcatcagcgataatcaatagtgaacgagattgttgcaatacttgttctaacaatggcaaaatatcttgaatattcgagattttcttatctgtgatcaagatatatgggttttctaaagcagcttccattttatcgttatcagtaaccatgtattgtgataggtaaccacgatcaaattgcattccttcaactacgtctagttcagtatcgatccctttagattcttctattgtgataactccatcgttaccaactttttccattgcttcagcaattaacttaccgacttcttcactgccagaagaaacagccgcaacttgtgcaatagcatctttcgaatcaacaactttagaaatgctatgcaattcctcaactgctgcttttgtagctaattcgattccgcggcggatacccattgggtttgctccagcagttacgttcttcaagccttcacgaacgattgcttgtgtaagaacggtagctgtcgttgtaccatcaccagcgatatcatttgtttttgaagcaacttctgaaactaattttgcacccatattttcgaaatgatcatctaactcgatgtcttttgcgattgttacaccgtcatttgtgatcaacggagaaccataagatttttctaaaacaacattgcgtccttttggtcctaatgtaactttgactgtatctgctaatttgtctacaccacgtagcattgctgcgcgagcatcttcagaaaatttaatatcttttgccatgattctttcacctcattattttttttattctacaattgccataatatcttttgcagcgatgattaagtattcgttgccttcatatttcacttctgtacctgcgtatttttcaaacattaccatatcaccaacagctactggcattggacttttttgaccgttttccagcacattgccttcaccgacagctacaactttagctgtttgcggtttttctttggccgctgaagctaagactaggcctccaactgttttttcttcttcttgagtaacttcaagaatgacacgatcacctaatggttttaacacaataaatccctccaactagtaatgattttctaagttgttagcactcttggttatcgagtgctaactcacaattcttataataccatttttgtttctttttgcaagtccttcgtctgcttttttgattttttctacactaagtttttaatgatatatggtatacttgggaacgataaatgtttagaaaggaatactaatgactgaaaaaaaatatagttttattacaatcttcacttatggattagtgcttttttcaccagttctttttcagagtcttctaaaagccggaccatcattgattattcagttaacgactctaacctattttctaggtgctatcctaatgattttttatcgtatcaaatcaaaaacgtttggcttagaaacgcgacaaaaaaatcttttgatcactattgtaattggaatcgttggaatcccagcatccctaattctacaaatgcttattttgcaaatcgagcagcgttttcttgggcaatcagtggcttcacaaaatactcaaaacattgtccaactgattatgaacaatatgattttcatcttagcaaccactattgctggaccaatcatggaagaatttgtatttcgccgtgcgattttcggctcattagaaaaaagatttggttttttcttacctgcactactaagctctgccctattcgcttttgctcataatgatggccactatcttttatatgcaggtctaggttgcttgttttgcggtatgtatcgttatagcggtcgtatctggacttctatgatcactcatgtaggtatgaatctgttagttatattgacacaattggcattgcagtcgtaagtgataccaatcgaatcttttgctattttataaaaacctccttagactaaagatacaatgtagcctaaggaggtttttgtatgaaagtagcaattatcggtgctaccggtcatgccggttcactgattttagcagaagcgttgaatcgtaatttagctgtaaccgcaatcgtacgccatccagaaaaattagaggtagaggtaccaattttagtgaaggatttatttgaacttactaaaaatgagatggaattttttgatgttgtaatcaacgcgtttcgtccaccagtcggaaaagaacaactgcaccaaacatccctaaaacatctcatcactattttacgaggaactgatacacgtttgattgtagttggcggagcttcttcgctgtttattgacgataagcatagaatgattgaactttctgatccaaacgccaattattatccaactgcctacaatatgtaccaagcgtttttagacttgaaagccgcgcaacaattaaattggacctacctaagtccagcggcaaactttatcccagacgggttacgtacgggccattatcaagttagtgatgatcacttacgcaaaaatgccgctggtaaaagtgagatcagtatggcagactatgccattgcaatgatcgatgaagtcattgaaccgagacacttaaatcagcattttagtgtttacagttagaaaaaggcaagcctgcaaaagcaagcttgcctttttagatcgcatataattcggttgcactatctggatcggtatcaaaaatttggaactggtgattcacaccaagatcataacgcgtaagtgtttcttccatcgtcatatgcgccaattccttcatattattctctttacttaaatgtcctaaatagattctctttgtccggtcgcctaaaatgtcggtcataactaatgctccatcatcattagacaaatgtccgcgatcacccaaaatacgttgctttaagctccatgggtaggctcccatccgcaacatttccaaatcatgattgctctcaactaaatatgcgtcagcatctcgaatcgttcctctcacatgctcactagcataaccagtatccgtcagcatcacgaaagaatggccatccttatagaaacgataaaactgcggagcagcagcatcatgtgaaacgccaaaactttcgatgtctaaatcacccaaagtcaatacttttcccatctcaaagatatgtttctgttccacatcaacttttccgatcaaaggagccatcgcttcccaagttttttcgttggcataaacaggtaatttatattttctcgctaaaactccaacgccatgaatatggtcgcggtgttcatgagtaactaaaatcgcatctaaatcctcaggttttcgatcgacctctgccaatagcgaagtgattttttttccacttaagccagcatcgaccaagattctttttcgcggactttctaagtataaagaatttccagtactgccgctggctaagatgctgatattgaaggcattattcatttctaacatgagcaattggtccccttttttaaaactgtcctcagtatacaaccctttttatggattttccacctttggaactaaattattcgtaatcacctgattatttaacgcatttactttttcaatctgcgttgtcttgtctggagtgcttattttaacaaaccacactggaacatagacatttttttcccgcacctcaagtgttctaaaataccccaaataaatattggtaatcgtcgaatcgcttggaatactgttattgatatacagcgtatttaaaatctctttttcagaataaagtgtcattttttcacgtaagggttcaatttcttttagacgagtctgagtatacttgatgatttgttcttgatcattgtttttttcgatgtccagtgtcacacgggaggtctcatccacaaatggaattccttcataggattgagctccgacaattttacttaactcatcgtctttcttagaaatatctggcaagtaagtatactcttgtccatccataatgaaatccgcatccttcatgagacgattaaaactgctagtagctttttttaaatcaaattttttctctccacctggataactcgttaatactctgtctgtgatatttgaatttctcgcaatcgtttgattccctgaagcacctaataatgtttcaaaattatcttgctctgcacttagataatatccttcacggtgctcatcagatacgtcttccttgatcttgatttcatcgttatccaaacgttgtaaaatgtcctcccgctgatttgaacttgtaacaagactttgctcatgctgattgttccaataaatactgaaaagaaagatgttcaatccaacaaagacgagaaaaaagatccattcgatttttctaaaatccaattaactcgcctccgtttcaaagtttccttgcatcagctgattagcagaataccaattattgtcatatttaacaaaccattccggagtcaaagcaaccaacttattcacaccatcaatatcttgccatgtgtagccgataataaaactttgaactttatcaagatcaaagccaactgcggccagactattttcaacttctaaggtactgggtagttctacttcttcatctgaaggaattggtacctgtacagtatccatactcgtttcaattttaatttgcggtgtcgatgcagtagtcgaatcttcgattttcacactcatttttccttttgatgatgggctaaatatcggatagccttcaacaaagatccgaaaattaatctgtccttcatgatgatcaaagtagcgcagattacccacagcagttcctagacggctaacataattgaagctctgactatatatgctttctttagataaatcacttggtagttcaccattgaatgtaaccaaacgtttttgttcgtccatcactagttcttcatgtccactaacaaaagaacgcataccactttcttcttcctcgcctctagcttgatcagggttttgaaagaacgcgttacgaaatagagaataagattgggtagttaaaatataactatatttctttaaacgaactcgatcttttgtgcgcaaaagacggggaactaaaggattttcagccaacattggcaaatatttctcttgatttttttgataaatcgtttctaaaccagtgaaatctgctgaaatcgtcgcttcatatactgtgtctttgctgtaatttaaaaagcgaatttttttcttagaaaaatctacttgtatttttgaaaacgtcagcttttctgactccttcactgaattcaaattaatcggcatatcaaaaacctttacgtattcagtcaaagagaagccgccttcgtaattcaactcaattccatcatttaagctgtagtaattctttatctcttcttcaccctgtgcgacctcttgaagttgtccataggtactttctgttaaacgtgcttgggtcgtagctaataaattctcgctacttgtttgaaatttaccttcgctcacatcccaaataccacggatcggtaaaaaagcatctgttgcctttgcgtaattctgatcatttttcactgcttgcttacttgtattgatatcggcagtttttgaggtgggactaagccaaatggcataagtcaagacgagactgagcaagatcagaataaaaagcgcgatgcggatgattttttctgataatttcattcccaaatatcctcctcataaggttcataaggtaaagaaatgtagaaggtggagcctttcccttcaacactttcgacccaaatttgaccttggtgggctttcataacttctttagagatagctaaacctagccctgtgcccccttgttgacgggctcttgccttatctacacgatagaaacgctcaaatactttttctaaatctttcttaggaattcccaagccttcatcagaaatgctcaaaacaacattgttgtgcgtctccattaaatgaacttcgatttttccgccgtctggtgaatacttgatcgcattattcatgatattgtcgattacctgcatgatcttatctgtgtcgatttcaacccacaaatcccgctctgtaaattcacggacaattcgatagtttttctcttggttgttgaccatcatgtcgaagcgatccaaaatataatccaccagttcattgaagttaaccaactcaagatccatctgctgtgctccagaatccatccgagaaagatttaatagatcattgatcatacgaatcatacggtcagtttcacccaaagtcacatggataaattctggtgctacgctcttatcctcccatgcgccttcttctaatgcttctaaatagctgcgaacactagttagaggcgtacgtaattcatgagaaacattcgaaacaaactgacgtcgctcttccgccgttttttcttgttcagtgacatcatggatgacaacaactaaaccgctgataaagccagattcacgacgaatcatagcaaaatctgatcgtaacgtcatgcgatcttcctcagagtcagattttgaacggtcaattaatatctcttctggtgtctctaataatttccgtaatgtgtactcttcctctaaatccaacaaagtcaaaattgattgaccgatggcttgttcactcgtcgtgttcaacaaggacagagccatctcattgatagtgataacttttccacggcgatccgtagcaataaccccatctgtcatatgagtcaaaacactgtctaaacgatttcgctctgcttccatcgtatcttgagcatcttcaattcgatcagatagtttattgaaggtttccgctaattgacttagttcatcatgtccttgaacatcaaccttttctgaataatcaccttgtgcgatccgtactgcttgtttttgcatttccttgatcggctttgtaatggaacgcgccaccaataatgccacaacgattgaaattaaccctgcaatcaaagaagcagtgaagaaaatcaatgcagtattaccgatttccgagtatttctgttcgatatcgctcttaacataaagagccccgatcacagccgaatcgccggtcggggactgaattggttgaacattgatatatacccgtttattattgtcatccaaagtgacgtattgtttcattgaaaagtcatcaatatcactatattcgtttcgtttcccaacgatagaatctttttggcctacgtcattggttgctagaacgattcctttatcatctacaacccacatttccttaatatcagcagcggagttgttttctaagagacgttgcagctgatcagcttcgttctcgctatcctctgccatcgttgaaccaagtgttgtactcaacaatgctactcgttgattcatttctttggtaaaattctcaatcgttgatttttcaagccctcgaataaagtacgctccgataatctcgatggatatcagtaagattaaaataaatgaaaaggcgatcttaaagttgactgatcgataaaaacggactttcttttccatacttactcctgttcagggttgcgtaaataataacctacgccacgtcttgttactaaataggttggatggcttggattatcctcgattttttctcgcaaacgacgcacagtcacatccacggtacgtacatccccgaagtaatcgtaaccccaaacagtttgcaataaatgctcccgagtcatcacttgaccaatatgttttgctaagtaatgcagcaattcaaactcacgatgagttaattcaatcgtatctccgtgcttagttaccatgtaagcatctggatgaatcgttaaatcacctatagtcaaatcactttgtgttgtttgctcttcttcttttggcgcttgtccgccccgacgtaaatttgcttttacacgagccactaattcacgattagaaaacggtttagttacataatcgtctgctcctaattctaaccctaaaaccttgtcgatttcagaatcctttgccgtaaccataatgatcggcatttcatgggtcttgcgcacttcacgagccacttccaaaccgtcctttttaggtaacatcaaatctaataaaatcaaatctggattgacctcttcgactttttccaaggcttcttcaccatcgtaagcggtaaagacttcatagccttctttggttaaattgaatttcacgatgtccgaaatcggcttttcatcgtcaactactagaatttttttcactaagagtcacctcatacctttgtaagattgtatgtacgccataccattatacaataatttcagagctgtttcatcttttcaaacagacgacgaatcttttacaactattacttaagaaaaactagataaaatattcatttattgaagccataataaaaaagatgagcacacgcccatcttttattccagaatctccaatagagacttacgcctttatattagtccaatacttggcataccacacccagcgaaccaggacctgtatggactgacaatgctggtgagactttaccgaaataaatattctcagctgtaggaaatagttcttgtaatcgttgcttaattttttctgctgtttccaatgcatcagcttgtgtgactgctaaattgaaccgtttatgatttccaatgtgctctttcaccaattgaagtgttttgtcgatactcttattcaaccctcttacttttgcaacagtatagtaaatgccatctgaattacatgaaatgatcggcttcaatttcaaggcactgcccaataaagaagaaactaagccaattcttccgcctttttgcaagtattccaatgtatcaacattgaaaaaaattttcgttttcggaattttgctctcaacttctgtgataatctctgtaaaagattttccttccttaaccaagtcaccagcatagattgctaaaatccccgcaccaatcccaacatttttcgtatcaattgattgaaagactaagccttcataatgttcgcccagcacacgcaaagcattgtacgttccactcaagccactggaaatcgttacgatgattacatgtgtgaacccttgtgctttgatatcatcaaatacttgatgaatcaattcaccatcgggcaaagaagtcgtcggtagttcttttttgatcaatggaaaaatagtatcagaactgatatcaatcccatcgcggtattctcgatcactaaaaatgatccgtaatggtaccataaaaaaaggaccattatctataacttttcttggaacatccgtcccagagtcaactaggatcgcaattttttcattcatcattttcgccttctttctgctgatccaattgaatgattttttcagctaacattttttgtgtgaatgaagcaacagcgctttccatcgctaaataataaaagtcatcgctcctgcgagtcaaatgaacgtcctcacctaaaacgattttagaaacttgcctcaatgcttcttcttgtacctcacaaaaactattgtaagcatccatcggttcgttaattgccagttgcatacgaatcaactcgttaatatctgggattgcaaaaacttgttttaataaggtaatcgcgatcagatatgccaaatgattccgattgtatctcttttttactggtggtggtactaatttatgcttaacgtaattgttgaccatcgcactagataaaagttgatgtttttcatcttcaatcagcggcgataaataccgatcaactagagtaatcacttgatccatatataattctaattcgggtagctcttcccaacgaggcaatcgtaattcctttagtccttctgcccaggatctgagcttagtctcttccatttttacacccctttcagtgtcattttatcaaaattatggaaattatacaatatagtttctaaaactaggtaattgaagagatttttaatgaaatttttttagtttatccttgcattctttttttctcagtgctaatatatgaaagtactttgtttgggccgttagctcagttggtagagcagctgactcttaatcagcgggtcgcgggttcgagcccctcacggcccattgggtgccaaacccacgtcatcggtacattcttggcgtcttcggacgtttcgaaaagaatgtgcgcggtggcattttttgtttttttggataaatttttagatagtaatttatttttcattaagataaacgtcaaaagagtgtttcatcactctaagcttaaaccgtctttaaaagttaggcaaaagctaactttttagagatggttatttcatgttttaaaaactcccactatcataatctcaggcttgatacttttaaaaaaacacattgcttcttaaaggatttcatacattaaaaagagctgtaacgaacttttggttatttctcaaatttggatatgagtagaaaaaaatggagcacatttaatcttgtttttagcaagaatccaatgtgtctccatttttttactttctattttatttaaactgctatggctttttcattttttaaatgctgcaatttcttcttataataggcgacttcatcttcagaagaatagataaagtgacccggtgcgatttctcgcaatgaacgtgcttttccatcatttggctctgtctgatacttgattcggcgacgctggcgctcgtggtcgggatcaggcattggaatcgccgacagtaagctttctgtatacggatgcacaccgtaatggtaaatttcattgctagttccgacttctaacagatggccattattcatgacaccgatacgatcactgatatgctttaccattgacaaatcatgagcgataaataagtaggtcagattatgttctttctgcaaatcttgtaataaatttactacttgtgcttgaattgaaacgtccaacgccgagattggttcgtcacaaataataaaacgaggacgaactgctaatgcacgggcaatcccaatccgttgccgttgaccaccggaaaactcatgtggatatcgagtgccatgacttgggttcaatccgactgtttccagcaaatcattcacaagtttgtcccgttcttttggtgttttagctattccattaacatcaatgccttcagcaataatatctttgactttcattcgcggatttaaagaggcataaggatcttgaaaaatcatttgcacatcacgacgaaactccgtcaatgcagattttccgtgaattttagtcacatctttgccatcgaaaagtatttctccatctgttttttggtttaaacggataattgttcggccggtagtggactttccgctaccggattctcctactaaaccaaatgtttctccttcgttaatatggaagctaacatcgttaacggcacggacttcgtttttactgccagtattgaaatattgttttaaattttttacttctaataatcgtttttccatcatagtcctccgttttctatacgcgatttaagcagaatactgattttgttttttacgaaaaatatcccaacgtcgttgaatttcggctggtggtgcaattactgttgcctgtggtgctaacaaccaagtcgcagccttgtgggtgtcagataattcaaaaaatggcggttccagctctgcatcgattttcaaagcaaactcatttcgcggataaaaggcatcgccctttggcggatctaataggtctggaggcgagccgggaattgcgtacagacgatcgttctcgctttctagcgtcggcatagatccaagcaatccccaggtatatggatgttgcggattataaaagatttcttcggcggttccaacttctacaattttccccgcatacattacagctacgcgatctgcaacattcgccacgacaccaagatcatgggtaataaaaataatcgacgtttcaattttttcttgaatttcttttaataattctaaaatttgcgcttgaatcgttacatctaaagcagtcgttggctcgtcagcaatcaaaatttctggattacagattaacgcaatcgcaattacaatccgttgacgttgcccacctgaaaattgatgaggatagtttttcaagcgtttttccgcatctggtatccctactagattcaacaaatctaacgccgcttttaagctttccttcttcgatacatttttgtgttttcgcaacgattctgctacttgcttgccaattgtcatcgtaggatcaagggaggtcatggggtcttgaaagatcattgcaatctcacggccacggatcttttgcatttccttttctgatttattaacgatgtcttgacctttgaaaagaatctgtccttcatcaatattggcattgctggaaagcaggcgcatgatcgtacgagttgtaacagatttcccgctgcctgattcccctacaattgccagagtttctcctttgttcaaatcaaaatccacaccgcgaatcgctcgaacctttccggcataggtgtcgaacgaaatgttcaaattatttacttctaaaattttctccataatatcgtcactctttcattttcggatcgaatgcgtcacgtagaccatcggctaataaattgaaacaaatcatgatcagcgagatagttaccgctggaatccatagtaagtatggcaagtacaagaatgttttgtatccatcgttcaatagagtacctaatgaagctgctggcggtgtcaatcctaacccaataaaacttagaaaggcttcgaagaaaatcgcagtcggaatactgaacatcatttgaataataatcacactggagatgttcggaataatatgcttgaaggcgatcttccattttgattcacctaaagtcattcccgctaaaacatattcctgatctttcagcttaagggtttgggctcggacaatccgtgccatcggtatccagttggtgatcgccattgcagccacgatcgagaatattcctggttcaaaaacaaccagcatcaagatcataaccaccaagtttgggattcccgaaagaatctctaaaaaacgttgcatcgcgttatcgactttgccgcctagcattccggaaattaatccgtaagcgacgccgattgttatatcaaaaagggctgcgataaaggcgatcaacaatgaaatccgtgtccccatgaacaaacggcttagcacatcacgacccaacccgtctgttcctaatagataatttacgttatctggaatatctgcttgcgcgtatttatcgactaattcaccagcaaccatggttttcccatttagaccattgatatttattccaggtactcgtggcggcaaattaataaaatccacattctgcttgcttggattgtgaggcgagacaaaaattgttaggatcgaaatcgcgatgattacgatcaaaagcaccattgaaatgactgccgctttatttttcttcaaacgacgccaagaatcttgtaagaaattcaacgaaggggccgcaatctcctcgcgctcctcttccgtatttttttgtaagggttgaaattcatcagcaggaatatcaacgattgaaggatatttcatttccattagcttttgctcccttctgatagacgaattcgaggatcaaccaacccataaagtagatcaacgactaaaatgacgaagaccagcatgaatgagtaaaggattgttacggccatgatcgttggataatcattggtcatgattgattttacgaattgctctcctattcctggaatggcgaaaatgttttcaaccacgagtgatccagtcatcaatgcgaccgctaaggggcctaataaggtcattaagggaatcaggctatttcgtaatccatgcctgaaagcaatttcccatcggctcaatcctttcgcccgtgccagttcaacgtaatcgctgtgaagcacctccaccatctcggttcggatgaaacgagccgaatcggccagtggcgacatagctaacgccagagttggcaagatcgtataagcaaatccttcccatttggcaatcggtaaaacttgcaatttcatagcgaaaatatattgaagtaaaacagcgaatacaaagttagggatcgaacgtcctaagatcgccactaaagttgaagcagtatcggcccatgaattttgcttcattgctgagattgtgcctaagataattccaacaaaggtaccaaatacgattgcctgcaaacctaattgcaatgatggaccgattcgaccagctaacaatgcagcaacggcttgatttttaaattggaaggaaattccaaagtttccttgtacaaggtttgataggtaaatcccgtattgaacgatcactggtttatctaaaccaacttgcttattcagcattgcaatcgtttcaggacttaagcgttcttgattggtataaggtgtccctggtaataattgcatcaagaagaatgtgatggtagcaatcaaccatagagtaatcaacataaaaaagacacgctttaaaaaatatttcaaataactgcccatgaggtgcctcctaaaataagtctgatgttccgttcttatattttgacttctacttttattatggtttagagtagaaagacattgtgaataactgttttctgattcacatttgctattaactattggagtgtatgtatgaaaaataaattatttcccattggaatcggcggaggtctgttggtgatcatcacgatctactcgatcttgaaaggatcacttacttttttaaccttatctaaccgatttttcttaattggactaccatttctaattattggtaccttgttttggattttttcttcaggcttctttgaccactttcagcattcgatgcatcaagccttcagtagaaaacaaaagaaaaaatcagaattccaagccctttcgcaagttggacaggggcgttattctttttggttgatcattgcagctattttaattttagcttcgatcatctgcgcattattgacattgacttaaaaggaagttggaacgttgctcgttccaacttctctttatttatcatcaacgcttcagaattattattaaaacaagcttgaaacgcctcttttacgctaagactattcttcaacatacgtccatttatagtcccatgaagcaccggcaggatgatgaacgatccctttgactttctcgttaactaaatgagcttcagatagttggtacagtggtgcgacacctgattctttcgaaatgatctcattggctttttgcagatcttcccatcgagcttcttcgtcactagcatccttattgccagaagcatcaactaatttgtcatactcttcattgctccaacgtccgcggttatatgagtttcctgttacaaacaaatcagtgaaacttgatggatcagcatagtcagctccccaaccaccaagtaggacatcaaagtctccagcatttgatcgatctaatcgaacagaaaatggcactggggttggtttcacggtcattcctggcaacgtgtcttccagaacaccttgaatatactcaataacttttttagatgaatctgtatcagaagccatcagctcgaaggacaattcatcgatgcctaactcttttttcgctttatcccaatattctttggctttttctttatcataaggtgctaatttcccggcttccttagcaaaatcttcgtcagtcttaggattttttgacatacctgatggcactaacccagtcgatacgactgagccgtcacctaatacttgattcactaaagatttacgattgatggcatacgaaacagctttacgtaagttttcgtttttccatggtgaatctgcttttcgttgattgtattcaagatagcttgttcgtgcttctttaaacgatttataggcggagtcattggcattttgttgtgccaattcgccagataagatgacatcatccgcctcgccatctttaaatagattcaatgaagtagaggattcttttacaacattaacttttacactagataatttgacttcgtctttatcccagtaagtatcatttttcttgtattcccattctgtatcagtaccaggtccgtcaaatccttctaacgtgaatggaccattgtaaacagatttgtcactcttagtcgcgtattctttcccattttcttccacgaccttctggttttgtgggaagaatgatggaaaggctaacaagtaatcaaaatatggtgttggttttgctaatttgatttctaattcataatcaccaactgctttaatccctaattcctctggagcttttttaccagcagagatatcggctgcattttcaacaggttcaaaaagatacgcatattctgaagcggtttctggcttaacggtacgctgccagccaaaaacataatctttagctgtaactgggtcgccattagaccattgggcatcttctcttaatttgacagtataggtcttgccgtcatcactgactttcactttctcacttgcgccagctggttgtggcttgttgtctttatctaaacggtagattccttcataaacattatttagtgcagcaaaactgattgtatctgttgcgactgacagatcggctgtcggcatttcctgttggaccactaagttaaatgttccgtttcccttagctttcgcactcgaactgctctcatcagtcgttgcgctattgcctccataacaacccgccaatgcgagcccgcaaatcgcgataataccatatgcaaatttgttcctcatatctttttccccttttgattcaattttcagaataattatgaagttctgaatatgaagagtagtttaatcatttgtttttaataaatcaaaccatatgctccgaatgttctaatattttttgctttttcgcaaattattcctaataaatcttgtaaaatcggcaattctcctaaagatttttttcaaactaaaattattttgctattttctgttctactcttgcatagtgacataagcatgatagataattaaatattcatttacagaaaaaattctttctaattatccaaggaatttattttcatccaacaacgtttcatcagcgtataattttattagaaagtattctaatctttttttcataatcgtattgacaattcttttctttttttatacgatgaatacaacaatttttaaaaaattctgacaataacgggtggttgccatgataaaatcaattaagtctttcaacgcaactttattattatagctgggactttctgaaaatcatttcataaagtccctattcgcattgcatcggaaaagaaagtggttcttttccgatggagtgctttttttatacccgtttttgatttaaggaggagtaaaaatgagaaaaattcaattttttgacaccacattaagagatggtgaacagacaccgggagtaaattttaatacgaaagaaaaagttcagatcgcccttcaattagaaaaatggggcgttgatgttattgaggctgggttcccgatcgcttcgcctggtgattttgaagcagtgcaaagtattgcgcgtcaggtaaagaatatgacggtaacaggattagcgcgttgtcagaaaaaagacattgatcgtgcctacgaagccttaaaggacgccgttgatccgcagattcacgtgttcttggcaacaagcgatgtccatatgcagtacaaattaaaaatgactcgagaggaagttcttgcttctattaaaaagcatgtcagttatgcacgtagtttatttgaaaaagttcagttttcgcctgaagatgcctctcgaacagaaaaagatttcctattagaagcagtacaaacggccattgatgctggagctactattattaatgtccctgacacagtcggatattcaaacccgacggaatatggtgcgatttttaaatcactgatcgaaaatattcaaagtgaacaagaaatctccttttcttcccattgtcacgacgatctaggaatggctaccgcaaacgcactagctgccatcgaaaatggcgcgaaccgcgttgaaggtgcgattaacggaatcggcgaacgtgcgggcaacaccgcgttggaagaagttgccttggcactatcaattcgcaaagacttttatcaatgcgaatcaaatattgtattaaatgaaacaaaaagaaccagtgaactggtttcacgcctttctggtattccggttcccaaaaataaagcgatcgtcggcgataatgcctatgcgcatgaatctggcattcaccaagatggtgtattgaagaatccagagacttacgagatcattaccccgactttagtaggcgtcaatcaaaattctcttccacttggaaaattatcggggcgtcatgcttttaacgctaaattggaagagctgggctatcaattaaacgacactgatagcaaagaagctttcaaacgctttaaagcattagcagataaaaagaaacaaattactgataaggatttaatcgccctgctcgcagatcaatatcgagaagaaaccgaaaaatacaagctaacggatgttcaagttcaatacagctcaaatggctatcaaggagcgattgtctctattattaatgaagaaaacgaaacgcaagtagcttctcagattggttccggaagtattcaagcgatctacaatactatcgatgaattactccagcaagatcctgaactaactgaatatgaaattcaagcattgactggcggagaagacgctcaagctgaagtccgtgtgactctgcgagataagaaaagcaacgatgaatttcgcggaatcggcgtcgatttcgatgtccttcatgcatcagccaaagcttacgttcaagccagtaatcacttaaaacaaaatgggtagttaaataaactgaaacctaagaatggattacttagatacacattttcgaaaaatgaatacttttatatgagataggagcagatacatgaatagtaaaattgttgttttagccggagacggtattggaccagaaattatggacagtgggctgcaggtactagcagctgtcgaaaagaaatgcgcgcatacatttgaacttgaagaacttccttttgggggtgcaggaattgatgaagctggtgcttctcttccagaaaaaacactcactacttgtcaggcggctgacgcgattcttttgggagcaatcggcggtccgaaatgggaaaaaatgcaggatactccagaaaaaggtttactcgcattgagaaagtctttgaacttattcgcgaacattcggccagtttcagtttcctcagccctgctccatctgtcgcctttaaaaccagagattcttgaaggcactgatttgattattgtacgagaattgagtagcggtatttattttggtgaacctcgagaattgaccgatacgatggcttacgatacagctcgttaccacaaagtggaaatcgaacgtattcttcattcagcctttaaaattgctcaaggacgagataaaaaagtgacctcagtcgataaagcaaatgttctcgcttctagcaaattatggcgatcgactgcggaagaagtcgcaaaagaatatccagattgtcaactagagcatcaatatgttgattcggcaacaatgaaactgattcaaaatcctaaagcatttgatgtaatcgtaacggaaaatcttttcggcgacattttgagcgatgaagcttctgtactaccaggctcattgggtgtgctgccaagtgcaagtcacagcgatagcggaccttctctgtacgaaccgatccacggttcggctccagatatcgcgggaaaaggaatcgcaaatccaatctcaatgattttgtcagtggcgatgatgctacgacaatcattccaagaagaacaagcggccaaagcaattgaaaagtcctgtgatacagttctatctaaagggctctttactcatgacttgggtggacaagcaacgacagccgaatttaccgacgcggtgattcaagaattggaggaagcataattatgggaaaaacactatttgataaactgtgggatcgtcacgtcgttcatggcgaagaaggctccccgcaattgctttacattgatttgcatttgattcatgaagtcacctcccctcaagcttttgcgggaattcgtgaagcaggtcgaacattgcgtcatcctgagcggacgtttgcgacgatggatcataatacaccgactgtcgatatttttaatttcactgacctagtggcaaaaaaacaaattgataccttgagagaaaattgccaagaatttggtgtccagctttgtgacaacggtagtgatcgccaggggatcgttcacatggtcggaccggaaaccggtctgacgcaaccgggtaaaacaattgtttgtggggattcacacaccgcaactcacggtgctttcggtgcacttgccttcgggatcggcaccagcgaggtggaacatgtttttgcaactcagagtctttggcaaaacaaaccgaagaatatgggaattaaaattactgggaaattaccaaaaggtgtctatgcaaaagatatcatcttggcgctaatcgctaaatatggaacggatttcggcgtaggatacggtgcggaattttgtggcgaaacgattgaaaacctttcgatggaagaacgcatgacaatttgcaacatggcaatcgaaggcggcgcgaaaatcggtttgatcgctccagatgaaaagacttttgagtatgtggctggccgcgaatacgctccgaagaatatggaagccgcgatcaatgattggaaagaactttatacagacgaagatgctcattatgataaagttctaacgcttgatgtcaacgaattagttcctttcgtgacttggggtacgaatcctgagatgggcgtgccgtttgatggcacgtttccggcagccacatcaccggatctgcaaaaagcttatgattacatggatctaaaacctggtcaaacaccgactgatattccaatcggctatgtctttattggttcttgtacgaatggtcgactgtctgacttgcaggaagcggcaaaaatcgtggaaggtaagaaagttcatgacaatgttaccgccatcgtcgttcccggttcaagacccgtccgtaaagcagctgaaaaaattggattggacaaagtttttatcgaggctggttttgaatggcgcgaacctggctgctccatgtgtctagggatgaaccctgaccgagtaccagctggtgttcattgtgcttcaacatctaatcgaaatttccaaggacgccaaggtaaagatgctcgcacacacctttgtagtccagcgatggccgcattggcagccattcatggaaactttgtcgatagccgcaaggaggtcatctaatggaaaaatttacgacttatacaggaaaaactgttccactaatgaatgataacatcgatactgaccaaatcatccctaaaggctttttgaaacaagtcgataaagctggttttggtaaacatctttttgatgaatggcgcttcttagaagatggatcaccaaatcctgcatttatcttaaacgctcctgaacgaaaagacgcaactatcttaatctctggagaaaactttggttctggctcttctcgggaacacgcagcttgggccattcaagactacggcttcaaagcagtcattgccggcagctatagcgatatcttctatatgaatgctttgaaaaatggcctgctgccaattcgtatggatcaaagtgtccgtgaaattcttagtcaaatcccggcagatcagacaatcacgattgatctgcctaaacaagagattcagactgctgaagccacctacgcctttcaaattgatccgacctggaaagagaaattggcaaatgggttagatgatattagcattaccctgcagtatgaagatgaaatcactgcatacgaagaaaaaatacctacttacgaataaacgaaaagagcgtatcaaaactttataataaaaagttttgatacgctctttttaatttaccacttgttcctgcacatattgcgcataaagcggatgactggcgattaactcactatgagttccatgaccggtcacttcgcctttttcaataaagtaaatatgatcagcatccacaatcgttgataaacgatgagcgattaccaatgttgtccgcccttccatcaattgatccaacgctcgctgaaccttttcctcagattgtgaatccaagctagcagttgcttcatccagcattagaatttttggatcacgtaaaaatgcacgagcaatagcaatccgttgcttttgtcctccagataatttcactccgcgttcccctagctccgtttctaattgatcgggaaattcacggacaaattgatcggcataggctaattctaatccatgccacaattctttctctgttaatgttcgatctaacccatactgcaaattctcacgaatgctcccagcaaaaacagcactatcttgtgatacatagccaatttgtgaacgccaattcgttagactaagatcatcgattctttcatcaccaattttaactgtaccgcctgttggttgataaaagcgttccaataaagcaaaaatagtagattttccgcctccacttggacctgcgaaagcaatcacggtatttggtttcgcttcaaaggaaacatttttcagaatcggacgatgcgctacataatggaaggaaagattttctgctttgatcgtcttacctgctacatcaactgcttttcctatttcaatgggttctaattctgttttcagaatttgttcgattcgttcagtcgcgcccatggtcttttgtacttgtgagaaaaacatcgcaaaactagctgctggcatcatgatattaaatagatacaacaagaaagctactaattgcccactcgtcaatgtacccgcttggacccggactgcgccataacctaaaatgccgacaaacaatcctaacataaccgtcgtgatgattggctgcaacatcgcttcaacttttgcatctttaattcctaagttaaaaatcttattgataaatgaaccgccgctgttcttttcaaattcttcaccattgcttgatttaatcagacgaatctcagataacttttcactggcttccgcattgaagtcagcggttgccgcctgcaattgccgacccaagcgtgacataattcgtccaatcggcatcataatcaatgccatgatcggcactgctaagaacatcatcgccgccattttccaatccattacaaatagaataatcatagatccaactaattggatcgcaccagtaataaaattaggaaactgcgttgcgactaaatctttaataactgtcgtgtcattcaccagccgtgagctgctctcacctgatttatgatcatcatagtaacccacgggcatttgtaataaatggctccataatttttctcgtaacgttttaacagcactttcaccaacatatcgcaataaaaagctgccaatcgcaccaaatgctagttgtgctacgaaagccaaaactaaaacaatcagcatccttttgtcgatttgtgccaatttacttgtatcaattaatcctttcgtcaattgcggaacgatcaagcttgccccacttgttaatagactcaaaaacaaaccgatagcaaacagtgatttcttaggattgacactcataatcaaacgtaaaaaatcttttaatttatagttactcttcttttcttctttaattgtttcttcaggcgctatactcatatcccgatccataattggtacctccttattcgcgtaaatctactaattttttttagaaaaaattagtttgattcgaatgccgtataccattcaactaatgcgctcaatcaattaattcacttttttactgagtaccttttcgcctatactttctgcgaaaagttgaactgacatcctcatttatttatacgaaaccaatttcccttctatgttaaaaatcgtcccattctgtattttctggacctttcgttttgtctggtccgttatagcagtcaggattgccgcaaaagtttcgacgaaaatcatgattgaaattccgagaaaactctcgtgacgcattgcgcatctcccgttgcatttgatgccgtataagatgctgctcttctcgcgaaagattttgccaatcctcttgccaattttcagcgaaatgttcacgcattgcttgcatctgacgcaaacgatccattggatcaacaaatcgtcctgcttgtttttgaaactcttcctgccagccagcggaaatcttttgcagatactcgctgaaattttcctgttcttcttccgtcaatccggcaaagaaggcttcactcatatcctcaccgacatgacttatttttttcgccttttgtcttcctttttcagttaggaaaacacgtttgattcgtttgtcatgcttttcttcttttcgcagaacatcgttacttttctccattttcttcattaactctgctaaggaacttgggcgaatatcaagaatttcagctaattggctttggattagtccgtcttcttttaccaaaattgctaaaactcgttgctgaccagttaacttctgtcttgtactcataaatgcattactagctgaactaataaaacgcagctgacgcatcaaatcttttgtaaactcactcataaaaaggatctccttactattattgatattcgtaccgtaacttcttcttcgtttgttggaaacgagctcatcgttattggctaatcttttctaatactgtcaaaatttagagaaataacgataaagttcggtacctaactttattacgtttgccattatagttcggtaccgaacagttgtcaacaactttgtaatatttttttatttattcaattaaatggttaagagcatgaatgacaaaaaagaacctagtgagattcactaggctcttacttcagattaatgtttatgctgttcctcttttactggacaaccactgtcacagtcttcgcatgagctgccatttttgattcttcgataaacaaccactccagcaccaccaaagattaagatactcaatattatagttgccattctttcacctctttgatttcttcgattgtaatcgtcggtgcttgtttaacagggcgtcttacgatgaagtaaatcatcgcagcaagtacgaaagccgctaagattaaaccaataccgaacttcccgttttcaaacatcacatgaccgaattgatagacaacaaaacttacagcataagccaaactacattggtaaccgatcgcacgccacgtccacttgatatcacccatttcacgatggattgcaccaattgcggcaaaacaaggtgcacatagcaagttaaagactaagaacgaataaccagcaatcggtgtataggctgcctgtaacgacttccagatttctacgccattttcagcaacttcggcatgacgatacaaaattccgaaggtcccaatcacattctcttttgctaccagaccagtaatcgctgcaaccgctccacgccagtcgccccaacccaatggagcaaataatggtgcaatcaagccacccaaagcagctaaaatgctgtcattttcatttaccgcttgtaacgagaagttgtagctggaaataaaccagatcacgatactagatacaaaaatgattgttccagcacgtttaacgaaagctttactatgatcataggtataccgtactgtattgccgattcgaggcatatggtataagggaagctccataataaatggtgttgggtcaccagcaaacagtttggttttctttaaagcgattcccgataaaacgatggcacccattccaacaaagtatgctgatggtgctacccagctactattggggaagaatgctccagcaattagagcaatgatcggcagttttgccgaacaaggcataaatgtcgtcaacattgccgtcattcgtcgatctttttcattttcaatcgtacgactggccattactccaggtacaccacagcctgtcgcaatcaacataggaatgaatgacttcccggataaaccgaacttacggaagattcgatccataacaaatgcaattcgagacatatagccgcaatcttccaaaagcgccaaacataagaaaagcaccattaattgtggaaggaagcctaaaacagctcccactccagcaatgattccatctaatatcaagctttgcatccattcagcaacattccacgactgcaaagtcgagctgacaaaatttggcacgatatcgccaaataaattatcattcacccaatccgttcccatcgccccaactgtttggattgcaatataatagattaaccacatgactaacgcaaaaatcggcaatgctaaaaaacgattggttacaattcgatctattttgtctgagatcgatagcttaaactgatcctcatcaatgacacataacgttttcaaatcggttatgaaattataacgctcattaataactaagctttccgcatcctcaccgaagattttctctgtgatctttataatctcttgcaactctttttcctgaatcggactcagatttaagcccttttgtgcgcgttcatcccgttcaaataatttcaaactgtaccagcggctatacttagcaacaaccgtactgcctaaaacatcttcgatttcacttaaggccgcctctaaacgtttatcatagtgaggaaaattgacttcctctactccttttttaactagatgaagggcttcgctgactgctttatccagtccccaattccttaatgcactgattcctactactggaacacctaaagcataagcaagcttctctagattaatctgcttaccactttttttgatgatgtccatcatattcacagcaacgactactggaattcctgtttcgatcagttgtgtcgttaagtaaagattacgctcgaggttcgtcccatcaataatattaatgatggcatccggcgtgcctgagagtaaataatcccgagccactacttcttctggagagtaaggcgatagtgaataaattcctggcaggtcatcaatacttacttcagaatccttcttatagatcccctctttacgttcaaccgttacgcctggccaatttcccacaaattggttggttccggttaaaacattaaaagtgctcgtttttccgctgttgggatttcctgctaaagcaatatgtatcttagccatttattctacctccttcgatacaaccaccatctctgattcgctttttcgtaaactcagctcatatccacgaacacgaagttcaattggatcacctaaaggagccagtttgacaacttttactgctgtgccttttgttaaacccatatccattaagcgacgtttgatcgacccgctgccgtgaacattcactacaacgccttcttcgcctgcatttaattggtcaagcgaaacccaagtttcttgatcttccgttagttccttcacaagtatctgcttaagtaaagactgggataaagccagtcgtgtattatgtagtagaataatgccattatcgccagaatgatttacgacggcaacttttgaaccgacaatcattcccaagtcctgtaaccggtgctttaaatcattttctaaaggcatttcgctaatctgaacgacatagttcaatgaaatatctgccaaagttgtcatattttcctccaccttactgttcgacttttgcatctaattaataatgagaatctttctcactaagaatagcttcatttgagtgcaaagtcaataaatggtcgaagattttctcttttttctgagcaagttgtttgacaatcattgatttatttggttcgatcctgtttttctcgttattaaaaaaactttttccttgtaaaaaaacatcttatagcagtttttctaattctgtaaagggatttttctttgcagctatccgttttcaacctttttgcaaaaaacacaaagagtagtataccaataatctaccaacacaatatatggtgtttaacgattgactttttccctacatcttttatactagtaattgtagaaatcaagggaggtagtcttatggtaaaagtctattcaaaaaataattgtatgcagtgcaaaatgacaaagcgttatttaaccgaaaatcaaatttcattcgaagaaatcaacatcgacaatgaacccgaagctctaggttttctaaaagatcaaggtttccaaagtgtcccagttattttcggcggacaacaagccatcatcggttttcgtccagatcaattgaaagcattagcgtaaatttgaaaggttgcggcagaagcgttttgcttcaagtaccaattaggtactgttccagattagttcagatgaacaatcgctgtgtctcacagcaataagaagaattatttccgaataagctacttctagagcaccttttttcgaaaactttgcgatccacgattgcaaagttttctttattcccagttccacctttttacagtttgcttagtgaaagagtaaatattgattcacaattgatcactggtgaagaaacttatttgaacgattagtcagccaaaacaaaaacatacagacactatatatagaaagatgtgacgaaatgagcctgaaagacctaggtgaagtatcttacttcaagctgaataacgaaattaatcgtccagtgaatggacagattccactaaataaagataaagaagcattagccgcttttttcaaagaaaatgttgaaccaaatacccatgcattttcttcagtgcaagagaaaatcaactatttaatagaagaagaatttttagaggccgagtttcttgcaaaatatacgactgcttttatcgaaaaactttatacctatttagaggaacaaaattttacctttaaatcatttatggcggcatataagttttattctcagtatgcgttgaaaagcaatgatggaacggaatatttagaaagctatgaggatcgggttgctttcaatgccttatactttgcagacggcgatgaaaaattagctttatccttagcagatgaaatgatccatcaacgttaccagcctgctaccccatccttcttgaatgcgggccgcaaacgtcgtggagaattggtttcttgtttcttaattcaagtaacggacgatatgaatagtattgggcggtcaatcaactccgctttgcaattatcacgcatcggcggcggtgtcggaatcaatctatcgaacttgcgtgaagccggttcaccgattaaaggttatgatggcgctgctagtggtgtcgttcctgttatgaaattatttgaagacagcttttcttattcgaaccaattaggccaacgtcaaggtgctggtgtcgtttacttagacgtcttccatccggatattgaaatgttcctatctgccaaaaaggaaaacgccgacgaaaaaatccgtgtgaagactctttctcttggtgtgactgtgccagataaattttacgaattggctcgtaaaaatgaagatatgtatttgtttagtccttacggcattgaacgtgaatacggtgttccttattcttatgtagatattacgaaggaatacgataatttagtcgcaaatccaaatattcgcaagaaaaaaattcgtgcccgcgatttagaaaatgaaatctcaaaattgcagcaagaatctggttatccttatatcatcaacattgatacagcaaaccgtgcaaatccagtggatggaaaaattgtcatgagtaatttatgttctgagattctgcaagtacaaacaccttctacgatcaatggtcggcaagaatatgatgtattaggaacagatatttcatgtaatcttggttcaaccaatatcgtgaacttgatggaaagtcccgattttggtcaatctgttcggacaatggttcgtgctctaacttttgtaacagatgaatccgatattgacgtcgttccttcgattcaaaatgggaataaactaaatcatacgatcggtttaggtgcgatgggcctgcacagcttctttgcgaaacacttgatggaatatggttcagaagaatcaattgacttcacaaatatttatttcacactgcttaactactggactttgatggaaagcaatgaattagcaaaagaacgccagacaaccttccataactttgaaaaatcagcctatgctgatggctcatattttgataaatacacgactggcgaatttgttcctaaaacagataaagtcaaagaaatcttcaaggatatctttgtcccaactgccgaagattggcaagcactaaaagaagctgttcaaaaagatggcctataccaccaaaatcggttagctgttgcaccaaatggttcgatttcttatattaacgatacaagtgccagcttacacccaatcactcgtttaattgaagagcgtcaagaaaagaaaatcggtaagatctattatccagcgccttacttgaataatgaaaccttgccttattatacttctgcctatgatatggatatgcgcaaagtcattgacgtttatgcgactgctcagcaacatatcgaccaaggaatgagcttgaccttgtttatgcgttcggaaattcctgaaggactatatgaatggaaaactgaaagcaaacaaacaacacgtgatttgaacatcctgcgtaactacgctttttataagggctgtaaatccatttattacgttcgaacatttactgatgatgccgaagaaattggctcaaaccaatgtgaaagctgtgtaatctaaatcattgttccctctcgcacttctgttcgagagggaatgctctgcgtaaataactactttaggatgtcaggccaacttttcacagttttcattcacttaaaacaggacaaattgatttatattagatatgaacatgtatagttggatgatatacgtggagagcattaaatttatttttttggactttaaaaaaataaatttattaatacgaaatagggggaatatccatggcagaaacttattatgaagccattaactggaatgaaatcgaagacgtcatcgataaatcgacgtgggaaaaattgactgaacaattttggttggatacacggattccgttgtctaacgacttagacgattggcgtaaactatctgacctagaaaaacaaactgtgggttatgtattcggcggtctgaccttattggataccgtccaatcagaaagcggaatggatcagctgcgtaaagatgttcggacgccccacgaagaagctgtcttgaacaatattcaatttatggaatctgttcacgcgaaaagctattcatcaattttcagtaccttgaataccaaaacggaaatcaatgaaatctttgaatggaccaataccaatcaatacctgcaaaaaaaggccgaacggatcaacgagatctataaaaacggcacaccattagaaaagaaaatcgccagtgtctttcttgagactttccttttctattctggtttttacacacctctatattatttaggaaataataagttggccaatgtagcggagatcatcaaattgatcattcgtgatgaatcggttcatggcacctacattggttacaaattccaacgcggattcaacgaacaaaccgaagaagaacaagaacgtttgaaggaatggatgtacgatttattgtatgaattgtacgaaaatgaagaacgttataccgaagaattatacgatgaaatcggctggaccgaagaagtcaaaacgttcttgcgctacaatgccaataaagctttgatgaatctaggcatggatccacttttcccagataccgcagatgatgtgaacccgatcgttatgaacgggatttccaccggaactagtaaccatgatttcttctcacaagtcggcaatggctacttgcttggtcaagtggaagccatgaatgatgatgattatttgattggtttagaataaagcaaaatgcagcccgcagtttcttgcgggctgcatttttttattctgacgcctgaattcgtttgatgactgtttctttattgacgatcgtggtcgttgcataagtcagaatcaattgtacgataacaactaagaaaatcatcagcaaaacttggattaatgggtattgatacactttaatttgcatcaacgaatgactttccgcatacaagtaaaccagatatccgagaatactgcctaggcctcccgctagtaaaataataccacctgcatagacgaaaccctctgttcgaagcattttcttcatttgttgattagacatgccgattgcctgcataacgcctaattctttttttcgacttaaaatactatcgattgtcgtattgattaggttcatgatcccaacgattgccaaaactagcataatagcatacccagccccagctgtcagttgcaacgtgtcttcccactgtttcaaaacttcttcataactttctaaacgaaacagctcatttccttcttcaatattttcaatggctgattgaacggttttagtttttcctttagcagctttaatattcacatagtaggttaaattatttttcgatagtttttttatcgcctcgttgctcattaagaaattatcaaagttcgtaaccgattgtgcaaagcttcctccaccaatgattgtcatgtctttttcaaacgtacgattcccatcaaagaatttgaaggtcaatgtatcgccgatcttgatttctggataatttgctaatatataacctgtcgcaataactttatctcctgagtttaattcctcataagtcgcatgtcctttctcaatatctctattgatcagagccatttgatccttagaaataccgccaattgataagctcattggcttgtctgtcccaggatccttaacactcggaacttctcctgtaatagattgaaatgcatctactttttcaacaccatcgattgctttaattttattaattaccttattgtttaagggattattttgttgaatcacagtccatttaagttctggtcgcatcttatcaccttctcgtgaagcaatactcatacaataatcttcagcgatcgtatcacgggcggcctgtttgggattcatacaactaaaaacagttgaaatgacgacaaacaaaattccaatcatccccaatgaaaaaatcgtgaccattgttcgctttttatttctagaaaggtttgcattggctaagcgtcgcagattaagatcaataaatcccttacgttgttttttattgccttgcatttgcccagtatagcgcattgcctcaatcggcatgattttactagcttgacgcataggtttcaaagaagccaaaataactgttagtaaagtgaccccaattgtcatcgcgataatccagggaaggatcaaggatacctcgccattatcaagtacctgacgcatctcctttgtcatagcttgttcacttgaaattgatgagatcaactgaaagaaaacaaattttactgcagcaatcccgattagtagtccagcaggaatcgaaagccctgcaacgatcaagttctctcgtaaaatgatttgacgtatctgtcttttagtcgctcctaaagctgccaattttccaaactcttggaccttattgatcaaagatacataataaatactgtaaatcgttaacgctccggcaatcaaaataattcctacaataatcgccatccctgaataaaaagcaggatcgatataattagcaaaaagatagtcgctattttcaacgatattatcttcagtaacatcgaaattttttccaatttccttgatttgctccttaatagcatcggttgaagtcgcagcagtttcgttcagacgaatcatcatgcgatagcttcgctgttttttgggaatgacttcctccataaaatcttttgaaacgagcattgaaaaaattttttcatcattttggttttttatatcaggagaaaaaccagttaagcgaaatgttttttcctgctgtaaacccatgccgtccgcttcatagatctgaatcggaattttaattgtatccccaattttcgcattcggataacccaacgtcttcaatgcatcccttgaaagcaccgcgtcgttcccttttttcggagcgtgtcctttcgtaaaggtttgtttagctaatttttgtgcaccgttatccaaatagctaatgaggataaagtcatctttatttagtacggattcaccgacatcctgacgcagaccgtattccccaatcaaatcatgctgagcaatttttcccatattttcttcagagacttggcgatacatcgcatgccatgttggataaaccttgttgactgccgcattctgaacatttaccacccctaatccaatcgaagtgatcaagaaaactaacacactggtcaaaataattgcaatcccggaaagtagatttttccctttatgatacttcgtgttggctaacgctacccggttgatcatcttcatttagatcacccgcccatcttcaaggtggacaatgtgatcagccgtttgcgcgattccttcatcgtgagtaatcataattagtgtttggccaaatttttcaactgatttttttaaaagtgacattacttctaattctgtcttggtatctaagtttcctgtcggctcatcggccaagataattgctggttctgctgcaatcgctcgtgcgatcgccacacgttgctgctgaccaccagaaagcatgcttggcaaggcttttttacggtcacttaatccaattgtcttcaacaagtcttcgataaatgctgtattgactcttcgattatctaaaccgatcggtaaaacgacattttcccaaacattcaacgatgggattaaattgtaattctgaaaaataaaaccgatcttttgacgacgaaagacagccaattgctcatccttcattcgaaaaacattcttcccatcaatgatgacttgccctgaatctggtcgatctaaactaccgattaagttcaacagcgtacttttaccagagcccgatttaccaactatcgcaacaaaatcacccttttgtacttccaaatcaatatggtcaactgcctttacgacggaacccccatcattataatgctttactagatctctaattgttaaaatcattttcgtctccttctttcctcatctcatttctatactcttagtataaaaaagaacccttgcaggattctttcaccgaacataacaaatttgtaagaaaagaaattacgttgctggcaaggtcaattgaaaattcgatccccgaggatgccgttgcttcaccataactgtcccgccttgttcttcaatgattttccgagtcagatatagtcctactccagaaccttctgccgtcgtgctagaactgccgcggtaaaaacgctgataaatcttattttgctcatcagtaggaattccaggtccttcatctttaatttcaaccaacacataagtcaccaatgaagaagcccgaagaatcactgtggtttgctttggcgaatatttcaccgcattttccaacacatttcctaaagcttctagcgtccattttttatcaaccataacaaaagtatcctctgacaattcaacttccaactcaatgtccttttcgactgctttcatgattacaccattgactgcttcattaatcaattgttgtaaggaaagcttttgtggcttcagttgaatcagatccgtttctagctgtgagatttttgctaaaccatccagcatcaagttcaacttgttgatctgaacttctgcttggtcggcaaaatttcttcgctcctgctcctcatattgatctgaaagtgcgatatccaagcttagtttcaatgatgccactggagtttttagctgatgcgtgatatccgtaatactggatttcaaatttccttcttcacgctgacttcgctgcaataacaattcattttgaattgaactctcgtgatactctttggtttccttttctaagcttttttgaagttttattttttccttcatctgccagaaaaatagtaacgaaatcagcagccagcaaagtgtaaatatttgcaggtttctaataagaagtgtccgtagcaggcgtggatgatccattttatcaatcaaattatattttgcttctaaggaagccccctcgttagccaagtcagaggtcttatttactttaaaagtcttgattaacgcagcttctgaaaatttttcttcctttactaacagtgctaaagtcgcttggcgatcttgttcaatttccgaatacattttaaaattttgagtgataaacaacgcaaaacaggctacagatatcaacacgtaaatcaaaactattttttttgaacgtcgttgatccataaataccccactcctcgaacagttttaattcgttccttaccgattttctgccgcaggcggctaatattcactgaaacagtattcgtgtcaacgtactcgcctttagtatcccagatttgatcaagtaactgatctgttgagagaatttgcttcggattttccatgaaaagcaccagcaattggatctccgtcttactcaacggcaaaagttctccttgcagcttaaccttcatttcgtttaacgagactgataattctccagaaatcaattcttgtccttgattacgcactactcgcttcatcagtgcctgtacctttgagactaaaaccattaaactaaagggcttggtcatataatcatcagcgccatgaacataacccgacacaatgtcgtgttcctgattataagaagtcagcattaatatcaagacattcgatcgttcacgaactttctgacaaaaatccaagccgctgccatctggcaaagaaagatcgctgatgattaaatcaatctcctgttgttcaaatgcccgttcagccgaagtaatatctaaacaagccgtgacctcgtatccttctctggtcaaacataattgaatcccattatttaaattttgatcgtcctctaataaaagaattttccccatttttcctcctatatataccaaataatcccattttactaactcttacttctaactctatcaatgaacagaagctctgacaatactactttattcaaaaaaagaggacaaaatcatcgttaaatgattttatcctctgtttcacacgttaatcatgcgtagttttgtgatatttttatacatggatagatcctcaatcacatccgtataattcattccacgtggtaaatcaatcgtatagacattcgtataaatccgataatcatccatgaaatccacgtcgaaatcaacatcttcgacttcgatttttttactctcaaaataattcataataaattccttggttgcttcgcggtggatataacgaatctccagctttttgatggcattaattttgatgaccctttttaccactgtcaaagccaaaataataccaacaaaactgcaaatagcgatcgtgtaatagcccataccgatggcaatccccaaaccagcacctgcccaaatcgaagcagctgttgtcagccctttaaccgaacggttgctgaccatgattgtaccggcgccaagaaaaccgattccgctgacgacctgtgcaattagacgcgcttcatctgctcgtaccacaccgacgaattctggcttcgccgctgcataacgcaaggcctgatcagcaatctccacttggatcaatgcgatgatcgtcgcacccatacaaactaaaatatgcgtacgaattccagcaggtcggtttttatattcccgttcaatcccgatggcaccacccatgatcatagctaaaaatagccgcagcataatttcataaacggataatttcaaatccatctgtgcaccaccccttcagttctgcttttattctgaaaagctttctcctttagtatagcacggtagtaaaaaaagaacgccaattaaccttttagtccctttaattcatcttcagttaatgagcggtaggctcctttgactaactctttagtcaacagcagcttccccatacgaattctctttagataagtcacttctttgccgcaggccttaaccattcgtttgacttgatggaatttcccctcatgtagaataattcgtacctttgatttattttccgttacttcatcaatcaataattctgctggcagcgtccgttctccatctaataaaaacccgtcaacaaaacgctgttgatcttcagccgtcattactccttgaacctcagcgaaatactccttttctacatgtttctttggagacagcaaatcatgcgctaatttcccatcattggtaattaacaataacccttcagtattcttatccaaacgacccactggaaaaagatcactgcggtaatcagagggtgaaaatatatccatcacggtctgatcgtgcttgtcctctgttgcactcacgacaccagccggcttatgtaataaatagtagtaaaactcttgataatgcaagatttcgccttgatagtcaacctgatccttctctggatcaatctgttttttatctgatttttcgattttctggttcacgctgatttgaccttttttgatcagctgtttcacctctttacgactgcctaagccgacctccgctaaaaatttgtctaaacgcatattctttaaatcctccaccttacttttctagtgttcactatagtcaaaagaagaaaaagaagcaagctcagccgtataatcgactgagcttgtactgcttattcaaataattgatcgatctcaccattttttaaataggggattgcttgtcgaattttttcatccggccaatcccaccatttgagctgctgcaatttttgaatcgtttccgcatcaaatcgttgtttgattttctttgctggaacaccgccgactacgctatagggtggaacatctttcgtcaccactgcctttgctccgatgatcgcgccatctccgatcgttacaccggataaaatcgttgcttcatagccgatccagacatcatttcctatcacgatatcgcctttattgtcccatgctgaagccacgtcttccttcttcagctgccattcctcataaaataaaggaaaggtgtaggtcgaaagggctgactgcttatgatttgcgctattaaaaataaacgttgcaccacaagcaatcgaacaaaatttgccaataaccaaacgatcatgattgattggatactgatacaagacattgttcttttcaaagtcacagggatcgctgcgaaaatcattataaatcgtgtagtctccaactgaaatagccggtcgggtaatcgcttgctgcaaataaatcgtttcatgatcattacttctagggtaaagcttttctactggaatagttctctcctcctttttttcgttagctaaccattccagttaaaacaatgcaccgcttcatacgttcacgctccttgaaataagtatatcacttgagagctttaaccttaaccttaattaatatagtagctagctattaatacgttcactaagcaaacagcgaaaaatgagttttattatctccgcatacacgattccactaacgtacttgaagtacgaagaggaactcacaaaaaaagtaccgaggaattttcctcggcacttcattgaatacgattataatttgcttgctgcgtcttcgtcaatgatcactgttacgtcagcatggttttgtaaaacacttgcaggtagatcaacagttacttcaccatcaatcatgcctttgattgcgtcagctttatccgtaccgaaagccatcaacaagatttttttactttgcataattgaaccgattcccattgacaatgcatgagtcggaacatcttcaactttatcgaagtaacgtttattagcttcgattgttgattctgttaattcaaccacatgcgtagtgacatcaaatggtgttcctggttcgttaaaaccgatatgtccattacggccaattcctaatacttgcaagtcaagtggatgttcagcaatcacttcatcgtaacgtttgcattcagcttccaagtcttctgcttttccatttggcacgaatgtttctttaaatggttttttgttgaataaatgatcattcatgaaataacgatagctttgatcgtctgatccatctaatcctacatattcatctaagtttacagaagtcatatctgaaaaatctaaatcgctagttgtcatttctttatataaggtttcaggagtgctgcctgttgctagacctaatacttttacgccgttttccattccatctttgatgatttcaaatgctttttttccgccttcattggcatctttcacacgaattactttcatgggtaaacgctcctttatcaatttggtatacaccaattttaacaccgatcaacgaatttttcaataagaaagtctagaccaaaatattaagtttttctactgttcatgcttaagatcattattatcaatttcattaagaaggtaaagcttttccaaaaaaatctccagaacagaattttctctgctctggagatttttttatttccctgttaaaagcaatccgatctgtgcaatgatcgcacttccaagatacgttccaataaaaacaaagatagcaacaatcgcaacgcgccaagaagtcttccgtaaatccatcaaactatctgccactgacagacccgcaaacgctaaaatcggcgtggtgatcgataaaaagtcaacaccggcaatcgcttgaacaaaaaagtcagaaagtagacagaaaaacaaggatgttaaggacacccagcctaaaattggaaaatcagctagaattttgatgttggttttcttcactaacgttgagataaatacgccaatcatagaaaaagcccacaataccactaatccttgaatcgtgttaaaggtaatcggagtagaggctggatttttaagtaatttaattccctgtgtaaataaaatcaagcagatacttaataataatacaagtgaaatcttaatatattcattagactgtttcttttccacggcgtgatcctcctgtcagtaagttgtacatgaaacgctgcaatggcactgcaataaataccatcgtataggttcctaaaaaactggtcaacaattgactcgcagcggcataggctgcgatcgtcgtttcattttcaggcattaaagcaattaaagaagatgaagctgccgtcatcatgctggcagagccgactcctgaactcatggctaacgcgcgataatcaaaaccaagcccagccatgatcggcgcaaaaatactaaagaaaatcgacccgaataatgtaccaatcaaataaagcgataataccccgcgtccttcggcagaatctagtgtatacttttcagaaatatacgctagctcgccttcccgacctagacccagagttgcaccgatagcctcccgacgcaagcctaacataagcgctactggcaaaccaataagaaccgttcccacgtttcccaattcttggaataagaacacccagccaacactcaatatttccttcaatcttggggctacatccgcgccataacgtgccattaacggcagcataatatacaataaatacttcgctgaaaattgaatattgccctttgaataaattttagcaactaaccctttgcgaagcactggtaatccaaacagcatcgccaataaaacagaaaatactaacggtaaaacggtaacagtcgtatttcctaacgtaatgaattgcatcccgatcaattctgcgatcgttaccaccgccaccacaaaaccaactaaccacactaattgcttcttcatacattccctccaattgaatcaattaattctttatattctttaaatgaacgacgatagattttttcctcatccaagttgccagacatttccattagcacctctgataaaaattctgggaaggtctctaaaacaaattctggatcgatcattttaaaatcatctccatgaattgttccttcaaatccaccataactgatttggatacaaggcatcataaatgctaaatcaccaatatcaccagctgctgcaatcccgccacgatcatcaataatgtccggaatcttatcgaacttcgcaaaggtccgctccacaaaactatttagataacgatcttgaacaaatggcaggtagcccagctccgtttcaatcgttacttcgccctccaaagcatacgcacttccttgtgcggcacgatctagctttcgcgctacttctggcatgtattctagtgtcttacagcgcaggtcagttcctaccgtaatgtgattcggaacaacatttgtcgacatatcgctctccattacaatggggttcactcgaatcgattctgtatccttaaactgttggcgacttaacccgatcgctgtattgaataacgtcgatatactgtaggcattaatacctgaaaaaggatcaaagcccgcatgagccgcttttccagaaaaatgataacgcttatacaggaagccggctaaatcacaattcacttcgatcgtcggccgttcgaagacttccccgatagcatggacacaaacaccaaaatcaacatcatcaaaaatccctaatgacattgcttccggttttccccctaagaactggattttaccagcagctcgaagctctttacgataatccaaatctaaatattcttccgccggtacaaagataaagcataaattaaagtctaatttcttatagtttccagttttaatgtaatgatcatacaaggacaatgcgattgccacctgagtaaaatgcccacaattgtgagcagcccccgtctgaggatctgcttgaaaatgtgtcggtgcataaaccgcgtctaactctgcaataaatgccatcgttcgttttttatctgttgataaaaatgttttaatccctgtttctgaaaatttagacaattctatcgatggatgaattcgggtcaactcttcgattactttttcagatgtgcgatgttctttatagcccagttctggatgtaaaaataaatcttccgtaaattccttcaattgttgataatacttagcaaacgtcgtcatttaactcccccttattgtcattcaaaaatgaatagttaagaaactagtataaattgtcactctttaagcatagaacgcctatttcattcgagtgcttcatgaaacgaaatttctcgacttgtttataatatctttttaaaaagaaagaatcaagagcattttgccaaaaacacgaactatttcggcaatcacaactcataatgtttatttatttgccaaatagataatgtttaaaatgatgtaattttcaaaactcgtccaaaaaacttatttataaatttgaaaacagataattttcagccggtttttgaaacgaaatttctttataaataaaaaaattccccaccgcaattatttatcgcggtggagaaaggaagagctatttgtgatatgttgctgaaatttcagcgattaactcattatcttttaaatcagtaacctgctggatcacttcggctgctgatttctcttttagcaacccttgcaattcaacactttgttcatcgttcggatcatcgtatttcaaaaccattgctacgacatctactaaattatcgtattcaagtccgcgctccttcaattcccgaatcggacgaatgaatcgttcatcaaagcccaacttacgaatcggtgtccgcgccacacgactgatactatctgaaatgtatttattttcgaaacgactaacgatcttatcaatgtaagcaaaatgcttctctttatcaaaattccatttattaatcaataactctcccgtttcgccaagaactgcacgtaatttctctagcacacgttcatcggcaatcgcttcatcgattgtttgataccctgcatatgctccagtataagcaaccgtcgcatgtccagtattgacggagaataacttccgttcaatataaggttccaaatcctctacatattccacaccttctagacgcagctctttgtttttactttgtgtcgcatcaattacccattcactgaaaggttccactgatacgaacaatggatcatcgtgatgttggattggcacaattcgatcgactgccgcattgggaaatccgatgcattggtctacaaaagccagatcttctgcggataaaaaagtttggaccttttcaaataaaaattgactaccgccaatcatattttcgcaggctactacatctagagcagctgtattgccttcactgcgacgtttttgaatccctttagcaattaattctgcgataaagggtaagatattgggtccaatcgctgtcgttacaatatctgctttactaacggaatcaatcacagcctctggattggtttgattgttcaagccgtccacatttgcgacatgaatttctttttgactttcatctgctaattgaatcgtgtattcgttgcgttcattcaatgcattgataattgtttcattgatatcaacaaaatcaattgaaaaaccattttttgctaaaatttctccaataaatccacgtccaatatttcctgcgccaaagtgtgttgcttgcatcctattctacctcctgaagatagctaatgacttcttcttttgtttttgcatctgctaatttaacgacattttcaacatcagaacaaaagattgcgatcttttgcaagatatctaaatgctcgttttcgatcccagcaattccaaatagcaccatcgctacgtcttctgtatcatctttcccaaagtgaacccccgtaggaacctggatcaccgaaataccgcttttctttacatagcgcttcgcttcatcggttccatgagggatcgcgataaagtttcccatataaacagagaccagcttatttctttcgatcatggcatcaacatagccttcttccacacaaccagcatccactaacaactgtccgcttgcacggatcgcctcttccttgttggcaaattcttggtctaataaaatcatttctggctgtaattccattttaaattcctccccgatttttaaaagcttgcgctagttttctcgaatttctttgacaaacaaagaactcaataattgatagataatctctttattgccgaatttgtagatttcagtattcagatcactttcgatgaccgaactgctgatttttcctaacaaactttgttggctttctggcattggatcgggtgctaacagtaatagtacccgggttaaatcaatactttttttatccattccttgaatcaagaacttccgatctaagtcataaatggtaaataatggttccttgacatgtgcatccgcacaatgaaataaggcaaaattggttttcggcacaccaatcggcgccaccaaatatcgttgaatcactttgttcgtcacgattttggcatctgatacgatcgtaccttgcatctgatcaataatctcttctaaggtcagctcaattgtttcttttgtgtttatctgtttaacatcaaagttttgtaatagactattggcgattcgcatggtctcataaatctcatcaaaggcttcgctaggctcttgttccggttcatctacatgtacatacgccttatctgggtgcagcgtttggatatagtctttgatttctttaatttcgtcatccaataataaaggtgaaatcactttgtacggcaaattaaatcctggtaaaaagaccgtcgctagaatcagatcatagcttttataatccaattgattcatttcagaaatttttgccacttgcactttttcaatctcgtttaaatacttgtgaattcgactctctaatattcgtgctgtcccaatcccactggaacataatactaatgcagatagtgctcgcccactaggatgatgctccagagaagttgcgaaatggatcacgacgtaacctaattcatcagcagtaaattgatgatccggaaaaacaaccgccaattctttgatgatcgctgctgtcaattcttgatacttatcacgaattttttgtaataacgggttgtttgctccctgaagaacggtcaaatttcgttttaaagcggccgacatatgggccgataaatcattgaaaagctgttcatcttttcgaaaatcaataccagacgtttcagaaaccaaacgaatcaattctttaatcttataggaaagctctacatcaaaactgtcaatgaaaatattttgcggcttcttataatttaccccttctaattgaaaggcaaagaaacgaacctcctgtggcggtatcgattttttcagcgtcgttgcaactttaatcatgatttgactagcaatctgcatactttcaggctttgcttttgtctcctgctcaacttctacaaaacgctcttgagacatacgatcaatcgatagagccaataaaatcaatacacgctgtagttgattgtctgtaacctgctcaaacgactgctgagaaatctgctcaaaaattcttcgagctaacaatagacttgattgactcaacaaattcaaaaagaagttatccgtcgtttttttcttttcatctagggaatcaatgaattggaaaaaatcaaactcactaacaccgttatagatcaaattacttaataactgacgacgttgcttttcacgaccgacaattcgtatgccgcgacccttgagacgctgcagctctaatcggtaatcaatcaagcttttttctattgtagctaaatcagaagtaatcgtcgctgaacttactttaaaatcaatcgctaagccctcaatcgtcgcttcttcatccattaacaataaagaacaaacaattgcactttgccgctgaacgttatctgtaaatagttctgcttgtttttcgcctaattgctgctgcaaacgttctaagtttaaagtttctcccacaattcgatagccttcgccacgaggcttgataatctgaatatcctgtgacttaatcgtcttttctatacttgagatctctcggtaaaccgttcgtttgctaacctgtaaaatatcttgcaattcttctgaagtaatgccatttggataatctaataaaagggaaagtatctttttttcgcgaatcgaaaaatacacaatatctcctccaataatgtcaaaagggtaaaagcagtgagaatcctcactgctttaagagtaatacgattctggataaaagaccacttatttccttaaattttgaatgaccttgtcatatttttcagaagcaactagatcgtttaatggcacatgtgtagcacttggtgcctgttgctctgctttaactgtctcttcactgtttgtaatgattaaagcactcggcttatcttgtaaaacattgattagttcaactgttacaggataatccattccgttgtctttcaataattttttcaaaatcgttgcacccatattggcagatcctttcacttgatcataaccaaagacaatgtgatcgactttcgagtagtctgctaaaccttgtaccacatcatctgtcagaggctttttttcgctgtcacctgctgctggttctgcggataagcgttccacgatttcatcatagcgtggagagttcatgaagttttccacttgaacgaaggttgcacttggtgctttttggcttgcacgatcatgcagttcttcttgtgtcacgatcaaagcattcggatcatcactcaagttattgattgccgagttagaaactggtaatgataatccagcttttttcactttatcacgcaatactgatgcacccattgcacttgatcccataccagcatcgcaagcaaagatgattttgttaatgttgccaaacatttcttgattgtcagctttcattgcactttgacctttgctttgtgcttttgcatcggcaactgctgcttgagtcgccgctaagtcttcttcttcattatgatccgatttaataataaccatagccactaagaacgaaacaacgcatcctacaacaatccctgctaagttagcaaaaatcgcatctggcggtgtcatagccataacagcaatgatcgaacctggtgatgctgctgctcgtaaaccggcacctaataattggaaagtaaatgttccagcaaccccgcctgccataacagctaggaataaaagtggtttcatcattacgtatgggaaataaatctcatgaatcccacctaaaaattgaataatgatcgcgcccggtgcagaagatttcgccgcaccttttccaaacaatgtgaaggctaataagattcctaaacctggtccaggatttgcttctaataagaataggactgattttccagcttctgctgcttgttcaatacctagcggagtcaaaattccgtggttaatcgcattgttcaagaataaaatttttgcaggttcaataaaaatatttgccaatggtaacaaatgcatgttgataattgactcaacaccggctgccatcaaattggttaacgagccaacaactgggccaatcgcataatacccaacaattgctaaagcaaatccaatcaaaccagaagaaaagttattgactaacatttcaaatccagccttaatcttttcttggaaagcgtcatcaaacttcttgatgcaccatccacccaaaggtcccatcatcattgcaccgataaacatcggtacatccgatcctacgataacccccatagctgcgattgccccaacaactgcaccacgttgtccatgtaccatgctgccgcctgtataagcgattaataatggcaataaaaatttcagcattggatcaaccagtgaagctagctgttcatttggaatatacccatctggaataaataaagcagtgataacaccccaagcaataaatccgccaatattgggcataaccattcccgacaaatgacttccgagacgctggacttttgcttttagtccacccttttgtccagtagcttgcatttccatcttcttttcctccttagaaataattatgaaatgatttcgtttacatatttatcatatatccatgagtatccgctttcaatcaaatgtagatagagctttggcacagaagtttgtgccaaaattaaaagccgcttatctaatagataaacgactttgtcttacttattaaatttgtttcgtaccccacgtttgataacatcaaaaaatcctagtgatcgaaccatatgatctggatctacgtattcacgtattgctcttaacacttttttgggttcctttgatgcaaaagaataagtgccattctttttcgtttgtatcgcgtaacgtggaatccattttcccttaaaaacaacagaagcaataacgtaatctacttcttcccaaggaatttgaacaaactttcttgcatctcgattattgaaaaattcaaatcccttatcaccaatcataatcttcccataatctgcgacacctaagtacgaggtagcatcgattgtcaaatcgacctttgtattgattgactgaaccataagacctactccatttccttatatgtatctattgaatcattatactttattttactcttattaagcaaaaaatgctcgggcaagcccgagcatttttcattaatgagtgacttttttacataatacctaatacgtgcaagccaacgcctactacgaacaagccaagaatgataacgattggagaaacttttttcttcaataaccacatgcaaagcaatgtcaatagtaatgcagcaagacctggaattaatgaatctaagttatcttgtaaagtagttactttagaactatctaaagcaagaccagaagcttgttgagaaagagcttctttaattccttgagcaccagcaggtaatttgtcccattcgatataagcacctttgtctaacttaacagtagaaacaaccggtgtaaatttcacgtttacccaccgttgcactaaagctcctaaaacaaacatacctagaatggatgcacctttagtaaccttttgtaatagaccacctgaaaggtcatcagtgattttagaaccagcacgatagccaaattcttgtgtataccacatgaatgcccaacgaataatattccaagcaaggaagaaaatgattggtcctaaaatgtttccagctaacgctaatgaagcacctagagcacctaacatcggacgtacagtaaaccagaacactgggtcaccaacaccggctaaaggtcccatcataccaaccttaaccccttggattgctacatcatcaactggagcgccatttgcgcgttcttcttcaagcgcaagagttactccgatgattggtgaagcgatatatgggtgtgtattaaagaattccaagtgacgttgcattgctaacgtacggtcttcttttgttttgtataattttttgatcgctggtagcattgcaaaacaccaaccaccattttgcatacgttcgtagttccaagaaccttgaatgaaggtagaacgccatgcaacggctaaacgatctcttttacttaattcgattttttctgccattttatttctcctccttcaagattaataatcattcaaaatatcgccaagcggatcgccagtattgcctccgccaccattagaagatccaccagaactttcttgtaggttcaagtaaatcaaagcgaatgcaactgcgataacacctagtgcgatcaacgttaattcagaaagtgctgcgatagcaaaaccaatcgcgaagaatggccatacttcttttgtagccatcatgttgataaccatagcgtaaccaacggcaacgaccataccaccaccgatagccataccatcagttaaccaagcaggcattgattctaagaatccacgtacagtgtcagcaggaattactaataatgcagctgaaggaatcgcaatacgaacaccttgcatacatacagcgataatatgccacatttcaacttgacgcatatttcctttttcagctgcagcatccataaagtgaacgattggcacagctaatgtacgaacgatcattgttaagaacaaaccagctacagctaaaggaacagcgattgcgatagctgaagaaacacctttaactccttgaccacctaaaactaaaataattgcagatgcaacagatgctaacgcagcatccggtgccacagcagccccgatgtttgcccaacctaaggcgatcatttgaagtgagccgcctaacacgatcccagcttctaaattaccggttactaaaccaattaatgtacatgctactagcggttgatggaattggaattcatccaaaatcccttccatacctgctagaaaggcaacgattactactaataccattgaaataccagacattataagccctcctatttaagttaattatcttgcttaagcgtttttcaattcattttttgctttgttaaggatttcatccatgttgtctttagaatcattaggtactttacgtacatcaaacttgattccttttgctttcaacttctcaaaagtatcaacatcatcttgtcccattgacaatactttgcttactacgactttcccaactgagtgagccattgatccaacgttgacttctttgatatcaacgccgccttcaacagcacgcaatacatcttgaggattttcaaatagtaacaacgcttttgtatttccgaaacgagggtcctttgagatttcaatcattttatcaacggggataacgtttgccttaacacctggaggagcagcttgttcgattaatctcttgcgaagatcatctttagctaccgcatctgaaacaacaataatccggctaggacctgtcgtttttgtccacgcagttgcaacttgaccatgaagtaaacgagagtctacacgagctaatacaaacttgatatgaccatcacctaatacagttccttcagggatagcacctgttggctgtccgccttcagccgctactggagctgcttcaactggttctaactcctctggacgaattcttacgccttcttttgccgttcctgaaatatgagcagcaatttcatgcgccgtttccattgagaaacgtgaagcgtatgcttcaataaccatcggtaagttcataccagcaacgattgcccacgaatctttgtgttcttcaaacagactgttagcttgattgaaaggcgttccaccccaaagatcaactaagaacaatacttcatcttggttttcgaaagaggcgattgcttcttccatttttgccttgacgtcatcaggtccttcactcggcatcaaagttactgctttgacattttcttgttctccaaagatcatcgctccggattgcaagataccattagcgaattcaccatgactggcaatgataattcctaccatctttatacctcctactattattgttacagctcaaaaatataaataagttcttacaaaacctgtaaccaaaattaattattgcagcatcttctcttttttgattaattgcatcagatctgtttttcgatctgtcggcacttgacgaatttctaattcgattcctgcattcattaaatcaagaaaagactcgacatctttactatccacagaaataaaattagtaatcattttctttccttcgccaaatcgcataccgccaatattgactgatttcaaatcaacacctgcctcaacgacctctactacatcttgcggagaagcaaacaacagcatgaccttcattccatcaaacaattgatcttgatacacttcaaccagttttctttttgtgacgacattggacttgattcctggtggcgcggcttgttttaggagaaacttacgcaactcatcgttcgcaacctcatcactaactactaagattcgctcgatccctgttgctttggaccaaactgtcgctacctgaccatgaatcaaacgatcatcgatccgagtgagtcgaatatccattaccatcccaccacctcctgcaaattacaaggctcagatgctaaaagacttgcgctacattctttgagtacagtattacataggcactcacctataataaagcaagtaccgtgccaaaatacactaattaaaatttctttatttaacgccttttcaacgatacacaaaaaagggatacagtatactgtatccctttttgtgtattatttatacgctaatttcttcattgttcttaagcaattgataaatatagtatcgttctgatgttggaattgtgatacgtaattgactttctaactcattcaatccacgattcattactacattatctgtaacgttctgataaatccgttttgattcctcatcaattttcaatggctgctgcaagattcctcgttcgatcgttccggccatgtgcattacgaaatttaccattaatgcatattcagaagaaaccccatcattagtaatgatggtttttgctaaacgccaaagcggatcgatcagtttattcggattaataaaagtaaagctttcctccataaacttgatacacaattcccgtgctttgtttgcatctaacacaacttcttcttgttcagacaaatcattttccagcaatagctcatctaaaatctgatcagctttttgattgataaatttctccattggaatatatggagcaccaactttcggatccatgatccctgtcgtggctaaaatcttgtattcttctttaaagataggcacctttgttttaatgtctgcaaccgctaaagtcaatacgtcaatatgcttcaaatttcgttgctgcaacggtcgttcaataatttcctttaagcgttgagctgttccttcgccagaagcacaaatagctaaaatcgcttgtttttcctgcggttctgctttttcattcattacgtgaccatatcctcgaaagccttgtaaggactcatacaattcatctactcctgaacctaatacgcttgatttccgagcagcttcgataagtaaaggagttgtgaccatatctagcgtacaaacttcgattccagtatctttttgaatttcttcattaaatgtagctaatgatcccatatctaccatgattaatactccgctgccctcatcgatctgagtcacagcttcacgcatcttttcgtaagcaactcttggatgcatatctaagggcatatcaacagcaataatattcgttacatctaataactcacgaacgacttgagccattgaagtagctgtactattcccgtgagctgccacgactacaccgatttttcctgaagactgatcttctcgtaaggaaacaagcagaacagtcaaatagtattcttcactgtcgggaatatccacttgaaattctttttcaactaagcgacgaatttcacgtgctactgcaaactctgttggataatccttcgccatttcccgaatattggcattcgtctctcgcgtttctccaacatgaatttttttcaagaaggaagaaatgtgaagactcatagcataaataaagttttgttggaaatgtgtatctaaacgttcactaactaaagcggcaattttgttgctgacatcgatcacatgcttgtcaacaaactctgtcagtcgagtctccgtatcaaaagtaaagccatgatccttataaaatgatttcaaatgaacattaatatccgtagaaataaaatgattgatcgtttcttgatccaaaccctctgtctttagtaaagccgctttatcaccgatgatatcatataagttatatggcaattcataagtgtctgttttgattaactcatcgatctcattgggggtgaccaccatctctggctcaagatatggcgatacatctgttgatttgattcgatcagcggaaagctgtaccaatcctgctttgatcccttcagtcaggtcatttagagtaatatgaatctcttcttgcatcatatgattcatgaacccgcgggcgcaaattaattgtacattggacttcagctgtccgacattcccgtaagaaacgctgcctaataaagctttcacaacatcttctgtcaaggtgattttcctttgaattcgattagcctccattgccaccattacacgaactaagtccaattgttcagccgctggccgactgccaaatgccggcatttgaatattgatcggaatacgtcgaacaaaggtgtctaataatgctgaatgggggtcttctgttgttgctccaacgattcgaacattcgcaaaacgatttttgcctgtttcaccaagccggctataggttccatgatccataaaatagaaaatcatttcttgtccttctggcggtaaacggtgaatctcatctaagaacagcatgccgccatcggcttgctggattaaaccatctttttctgtgtctgcaccagtgaaggcgcccttttcgtaaccaaataagtgactcatcaacaattcaggattatttgcatagtcggcacagttgaaaacgaccaattcgcgatccgcttctactactccttctgtctgagcaaactgaaacatagcatgggcaaaaaaggttttccccgaaccagttggaccggtaatcaagcaattcaatccacgaggtggatacaatattgctgctttggcttgctctactgcattacgcatacttccagtagagccgataatttgagtaaatacattgccggtatttttatttagaattttcttctccggcggctccacaacacgggcgtgcgtctgagggacttctgcgtcaaacgacgttgctgctgattggttcgaaacaaaatagcgaacaggtcttccttcacttttgcttaaatgaccatccttaacaagaagatttaaatctttactagcatttgtccgttgaatatccaatgaatccgctacatctttcgtcgttacatttgcattctctgaaacaaagcgataaatgcggtcaatccgtcgttccattcagtcaccttctttattagtgtattctatattatcaatcatctatagtttttattaaaatgtcaaatatttcgctacaaaataatacactatattttttgaaaatgaaagtttttgggattttctcccaattaaccttaaatatacttaagcttttttacctttttctttggtattatgttttccgtgtcgtgtttcttctattataatagaagataacttcggttctttttcaaaacaaaaaagaaaatttattttttaccaaagcgtctattcggggaactatttttccatttgccaagaaagagccaaatttttattggattttgccagtcactaaaaatccgactcggttagtttactacttcaatgtcacatgaataataaaaaatcttacctcaaaacgagataagattttaacatacgctctttgaccattaactcttccaaagtgattttgaaaaaagtaaaagaatcgggaaaatttccagtctgcctgccagcatcgcaaaggaaagcgtccacttagaaaaatctgataaaaagccaaagtttcccgttggacctactgccttaaatccaggaccaacattattgatacaggttgcaacagcagaaaaggttgtttgaaaatcaagattttccaaagacaaaataagcaatgacgctgcaaacaccaatagatagagaactaaataagaataaacattactaatcgttttaggcgcgatcgcctctccttcaaaattcaaagtcgttacactacgagaatggatcatttttttcaactcttggatagcctgttttgatagcataatgatccgagaaaccttgattccaccaccggttgagcccgcacaagcaccaataaacattaataacagcaagatcgtttgagaaaacattggccacttgtcataattggttgtggtaaagcctgttgtggtgatgattgaagccacttgaaacaccgcataacgaaatgctttcaaataagacggatactgtgaagcaatgttgagcgtaatcaaaagagtcgaacctgcaataatcgctaaatagcctcgcaattcttcactcttcagaaccggagcaatttttccgatcaaaaagaaataaatcagattaaaattgattccaaatagaatcatgaagaccgtaataacgccatcaatatacgcactattgtaaactgcgatcccttcgttagacatggagaagccacctgttccagcagtcgcaaacgaatttaaaatactgtcaaaaactggcatacctcccagaatcagcaaaataatctgcactaaggtcaacgcagcatagatcacataaagaattcgtgcagtcactcgaaccttagaaaccaatttaccaataacaggaccaggcatctcagcttttaagatgtgcattgtgcgtccagaggccagcggaatgaaggcgacagtgaacactaatattcccataccaccaacccaatgagtaaagcttcgccagaatagacttgcatggcttaagccatctaaattagataaaatggatgagcctgtcgtggtaaaaccagaaacagtttcaaaaaaagcatccgtaaaagaagggatctctccagtaagcataaaaggaagggcgccaaaaaccgataaaagaacccagctgactccaacaatgaagaacccttctctagcataaatattacgatttttcggaagctttcgactcattaataacccaaccaagaaaacaaataccgctacgatcgcataggaaaggccgatgtgctcttggtagatgaaggagactactaacggaagaagcaacagaaccgcttcgacctttaataattttcccaatgtgaatagaaccatttttttattcattatgattcaccattatttccttaccagatcatttaaattacaaattttccgattagttgttatgacgactagatgatccttcaagcgaatctgggtatccccctttggaatcacaaaacctcgttctcttgagatcgccgcaatcaacgtattatttttcaaattaacctcagaaacttttttatttaagaagcaggtttgcggtgtcactacgaattccatcgcttccacctcgtcattgactaagcgatgaagcgttcttacaccgccgtcctcgtctttattgttctttgcgcgtacaaaacgcagaatatgtcccgcgataatattcttcggcgaaatgatactatcaatgtctaattgatctaagacgtccataaaattcgtccgagtaacttttgcgaccgtttttttggctttcatttgtttgccatataaagaaatcacgatgttttcttcatctaaaccagttagagcgacaaaagcatccacattttcgattccttcttcgatcaacacttcctcatcgctgccatcagattcgatgatcgtcacatctgggagttttctcgaaagctctaaacaacgcttcggattattttcaataatttttacttcgattccctgctctacaagttggcgcgacaaataaaaggcgattcttccaccgccgacgataatcactcgttttgttttttgctcaaataaattaatatcatgacaaaaccgaactaaatcgcgatgttgtcccatcacatggatgcgatctccttgttcaaggactgtattgccatcaggaatgatcagcacgtcttttctgcgaactgcgcaaatcaatacattggttttagaaatcttatacaaacgatttaacggcacattgatcaatttcgcattttcccgtaagcggaactctgccatctcgatcttaccgccaacaaaggtatccactttaaacgccgaaggaaacaacaatatccgacgaatttcattagcagcttccagttctggattaatgatcatagaaatcccaagctgatcccgcataaaggaccgctgttttaaataatcagggtttcgaacacgagcaatcgaatttttagcccccatttttttcgccattaagcaagctaaaatgtttagctcatccgattctgtcactgcaataatgatgtctgtatcattaacgccagcctccaataaaatatcataagaagctccattgcctacaacgcctaatacatcgtactgattgacgattgcctcgaccttttcagcatgtaaatcaatgacaactacatcataatcatagtcttcatcagataaatgctgagtcagcgctttgccgacttttccagcacccaaaacaataattttcattctatcctccagctaaaaattgatattcttatcctccattctagccttttctacataggaaaacaacggactttgcaaaaaggatttttccataattattcaaaataaagcgattttttggtttgttcaagaaaaaaacaaaactattataaaatccacaccatttaagggaaaaagtaaacaaaaatttgcaaaaggatacttgttttttcgacgagcctctccatctgaatataaaataaaaaagcactctaagcagaaattactacttaaaatactctttgcacattaatctacgctatattatcgctgtgagaaatgtaatggcacctaaaaagatacctggtatattcgcaacaataattggataatcttttttcttctgcatcgtagcatagatgacccaaaagatacagttaatcatcgctactaagggttgtattggattacctttatttccatctaaattattcataatctgtggggtatatgaaacatacatcatcaccgatagaaacgaagcgatccttccaaaaatcagtactgttcgatccttcttattcaataaacacacctcaaaacttttttcattagtaaaatactaacccaaataaaaaaagaagcgaaaaaaaagccctaaccctgtaatcaggattaggacttcaatactcgattaagcttcttgagcgactgggtatacagacacttgttttttgtcgcgacctttacgttcaaaacgtaccacgccgtcaactttagcaaacaatgtgtcatcgccaccgatacctacgtttacaccagggaaaattttagtaccacgttggcgataaagaattgatccaccagtaacagtttgaccgtcagcacgtttagcacctaaacgttttgattctgagtcacgtccgttagaagttgacccgccaccttttttgtgggcgaataattgtaagttcatattcaataacatgagctgcacctcctatgatttagattctgtttggatctcaatgaaatccaaatattcagtttcgattgattgcaagcctaataataaatgctccagcaaaatttgcgagatattcatctgctcttgtgtcatggaatcatcttccttcaacgctacatgaagataaccaccttcagcatcgttggtttcgatattcggagtgacacctgctaatgcatccaagctatttactgtgctgatggctaatgcggaaacagcggaacaaacgatatcgctaccgtaaggaccggcttcagcatgaccagtcaaagtaaattcgctgattagtcctgcttgatttcgagtgaatgtacctttgatcaacttaggcaccttcttttttatgctttgattgagtcaatgacaactttagtgtaaggttggcgatgaccttgtttacggtgtgaatgttttttaggtttgtatttgaaagtaacgactttcttttgtttgccgtgtttttcaacagttccttcaacagttgcaccttcaacgataggagctcctactttcgtagattcgccgcctactaaaactacttggtcgaagacaactttttcgccagcttcaacgtctaatttttcaatgtagactgcttgaccttcttcaactttgatttgtttaccgccagttttgatgattgcgtacatgcttgtggcacctccttataataaatacttagactcgccatcccaagtgaccgaagttcttaataacttgttctgtgcggttgtagctgtgagttccacaattacaacattcatagtttactaaaaaagataggtcaagtcaatgattaattattgacgcatgccttggttttttctactattaggaggatgacaaagtgaggcgaagtaaatggactatccaaatagtttggtcacgttcgttgaagaacgttcaaaaggatttcagcttgaaggctttatcgccggacaaggaccgctccacccgaagttgatgttggttggtgaagcccccggtcgtaaagaagtagtaaatcacattcccttttctggtgcagcgggaaaagaattaatccaagtgatggcgtcaatcgggcttactcgagaaaacacatatatcaccagcgcagttagaagtcgtccctataaagtcgtgcaacgtttaaacaaacggacacaagaaaacgaaattgtttatcccaatcgaacaccaaataaaaaagaaatcctagcacatgcaccaattctggattatgaattggaaataattcagccaaaaatcatcgcgactttaggcaatattggactacagcgcttactaggaccaaagtggcagatcagcgaacgacacggggaaatttaccatggtcctgtgttagagctgaaccgagaacagaataactatcaaccaaccaaaaaagaatatacagtcatcccgctttttcatccggcagcgattttctataatcgttcactgaaagaaaaaatagcgaccgactggttaaacatcggaaaactactagagaaagaggaaatataatgcgcaatgaaatgatgtaccgcccaattattaatgaagatatcctgcactatctgcgaacagaacaaaaacaactgactggatcactaggcgaattagaagaactggctcatgaaaatggcgtacctgtaatcccacatgaaacggtagtcttcctgcaatttttattaaaacaaaaacagccaaaaaatgtcttagagattggtaccgctattggtttttcagctagtttgatggcggaaacccttggcgaagacgcaaaaataacgaccatcgatcgtttccctgtcatgatcgaaaaagcaaagaaaaattttgaaaaacttggtttaactgatcaagtcactctattagaaggagatgcggcagatttactcagcagtctagaaggtccttacgattttattttcatggatagcgcgaaatcaaaatacatcaccttcttgccggaatgtctgcgtttattatcagacgatggggtgttgatggtagatgatgttttccaagcaggcacggtgctgcagccgatcgaagagattccacgtaaaaatcgttcgatccatcggcatttaaatgaattcttagaggaaattactaaatcatcagagcttacttccaccctactacctttaggtgatggcgtagcactgatttctaaaaataaatagatgtatggcggaaatttgaatcttttttgaatttccgtcttttttacttgtacctgagaaaaatcggcgtacactaggaaactgaaatggaggaattgcctatgaaaaacaaaaaaatcgggagcatcctagcaattttagtcgtatgcatcctcggaatactccttttcgaagcaaaagatcatgtacacgcaataaagaatggggacacctctttagcgattccagcaccagtgattatggttccgggaaccaatggggatgttgatcgcttcgatagtttggttgattcattaaaacaaacggaaaaaggtgtggaggaagtaaaaattacggtaaataaagatgattctatcacctcttcaggccattttacgaaagagacaaaacggcccattatcgccgtcgcctttgaagatggttcagatccctcattaccgaaacaatctcgttggtttcaacaggctttagcgtatgccgaaaaaaaatatacgtttaacacttatgattacttaggctattcaaacggcggattgatcattaccggttatttggagaatgaacaaaaaagcgatgatcctgccctctatcatttgattacactaggtacaccttataatgatacctcttgggaatacaatgacaacagcaactcattcaccaaaccaaaggccaaaagtgaattactgaattattatttgaaaaacaaaaagaatattcctaaaaacatcaccgtttataatattgccggtaacgttgatcatcagaacacggacaccactgtgccgctaacgagcgtcttggctggccgtctgatttatggaaatagtgaaaaatataaggaaataattgtcgaggaacaagcagatcacggatcactcatcgaaaatcctaaaacattgaaactgatcaaggaatatcttttcgaatcagtaaaataacgaattaggttgacaagcaaaggtagtttttctataatagttcttgttgcaaaactactgtcacagtagctcagctggatagagcatccgccttctaagcggacggtcgggggttcgaatccctcctgtgatgtcaaagaaaccgatagagacttgagtctctatcggtttttctttattattttattttcgttttcactgcttttggtgccacaagtaaaacacacattgctaatcccaatacgatgaaaagtactgcccccatgacattccctttcgtgagcatcgcaaaggcgatcgtaccgaaaagactggcaacggttaaaacgatgcctgatttttggattcccgtcagtttggcgaaagtatttctaaaaccgatcgtcaataataatgaaccaacaaatgaagcgaacccaaaaacgatgtgaccaactaaaataagattttccatgtcttcacctccctcagaaccactatactagaaagcctgatggaagactaagaatgtgcccacacaatctcgaattttccctaattattcaacttgataacgcaaaatcgtttgccgtttttctggtggagtttttctagcatcatttaaataaatctcgcgatgaaggtagcttctgcgtgttaacccttgctccttcacaaactgattcatcttttgaaaagaagccggttcatcgtcgaaagaacctacatgtaacatctgaacgcattttccatcttcgattgtttcaaagcaaagctcctgcagcaactcattgggttctttctctgccacagcggcaagcgccgtctcgaacatctcttgcgtgatccaatccggctgtcgcagcataattttgtattcaaagctggctttatcagtaatatctgccgtatttttagtggaccaaataccttctagtggaaagatcgcaaactcactataatcaaactcagactgattttcttcgtgtgtttgataaaacttcttaaatcccatcttaatcttccaggctactggatagagtgtcccgactctagctgagaaatcttggttgttaggatcaccttctcccttaatcgtaagaaatttttgcggtggtaccgtcacaatttctggcttctttttctttccatatagatgcttctcttgttttttccaatcatacttcatttttttccctcgctttcagctttgacttcattatagcgagtaaaacctgcaacctcgtgtcaggtttaataaatagttttcaattggtcgattttcttgctcatttcttggcgcacggagcgtggagataagacttcgatttgtccgccaaaggaaagtagaaaactataaaagctctcattcactgggtattccccttctaccagcaaacgcccatcctctgcttcttccacctgctcataattttcataaacccgataggccagctctggtgtaaaggcaagccgcaccatttgcttcttttcggtataaattttttgtgggtcaagcactttttctggtgcggttcgttcaaaggtttcagtagtttgctggagctgcttgatccgtttcagcttgaagagacgatacgcctgcttctcgcagcaatacgcatataaataccactctcttgctttaaaaatcagctttaatggttcaactttacgatcagagccaagctttcctcggctaaaataatgaaaacgaaggcgtgttttttgaaaaatcgctttttgtaaaatctgaaattgttcttcattttgcggatgccaatctgaaaagtcgatctcgagccaattcgtggtttgtttctgaaaaacactacccagtttttttaacaacgcttgattgtttttctcatccactccacttaaaccttgcaaagcggccaaaatctgattttgttcttcttctgaaatcaaggaacggttcaatataaaattttccgacaggaagatcccgccgccttttccttgtgtcgtataaacaggaatccctgctgaactaaggatgtcaatatcgcgatagatcgttcggatcgaaacctcgaacttttccgctaattcaggtgcggtcgtattgcctttatccatcaaataatacaccatctgaaataatcgatactctgccacactactcacctccatcatcagtatagcatcgtaaactggcaaacacgtgtcaggttaaaaaaagaccttactttgcttggctgcagtaaagtaaggacgatgctgtttattagataagttatcagaaaaaagaataaagagattgccaaacatacatcccctcaactttcccatctctatttcaaaggttgattaggctgcagcaacactttcccgatgctctttccgttctcaagatagtcatgtgcttttcgtccctccgctaaaggaaaaattgttggttcgctgatgctaatttgtcctttaatgaagtagctgaataagcgctcactacgaacttttctttcttcatagctggtcaaataatcccaaagatctcccgttaacaaactttttgattcagccattaacgcgactggatcaattttcactggatcgcctccagccattccgaaaaagatgacctttccacgatgcttgatcaaatctaagctttgctgaatggtagaaccgacgccatcataagcagtcgaaaattgccctttaaccgcttcagtccaattgttttctcgacttggataaacctgcttaaccccatgagacaacgccaatgcctgtttctcttcagaagaggcagaaccatagacttctatcccatctgctatcagcatttgtgacaataactgaccaacgccgccgctaattcctgtaataaagactttctcgccgggatcatttttgccgagatcatgagcaagaaaatcggctgtcatcccctgcagtccaatgctcgccgctaatttactgtcgatgtccgccggtaaaggaatcgcttgcacacttggtactacgacatattccgcattcgctaaagggacatcgacaaacagcactgtttctccaatcgcttgtttcgttactttagagccaatttcaacaacaatgcctgtaccttcatagccatttatatagggtttatgtttttcaatatgatactcaccacggcggcgatagatatcggcaaagttcaaaccgatatatgctacctgtactagaacatcattttccccgatcaccggtttaggaagctcaccatattgtaaaacgttactgtcgccaaaattttcaaaatacaaagctttcattaactgtccctcttttttattgattattttctcaaatatactatgaagctttttttccggcaaagaatcagattgcattttctccccgcgtttgatacctttgaatgaacacaaatccttgagaggagtcctttgcccatgaacttagtcactttgccacaggaattatctgtctatcaggttgcagacctgaaggaaatagatttcacccagcaaccactttttattagtgtaaccgaagaggaaatatcggttgtttccgctactgccaatgtccctacaaatacgatcaatcgtgaggacagttggaaagccttcaagattgaaggtgtattggatttcagcttagttggaattttggcaaaaatcgctgcattgttagcagagaaggaaattagtatttttgccgtttcaacctacaatacggactatgttttaattaagaccgataagtttgatgctgccattacagctttacgtgaaggtggatatactgtcgcataaacgattttttgccaaaaagagccttttaaggttctttttttatgtatttttcattttttagacttatccagccttttttccgagaagaaaataggactttgattggacgaaacgctttcgctattctcttattatgagagtgtagagataaaacagaaataatcattcataattggtaaatgttgctggtagaaattaggaggaataaaaaatgaagcgaaatggtttagatatgacggtagtaatattgggaattgcttgcattggtttattgacagtgaatcggtatattttacgccctttatggcaatcagaatttcggactgaaatgagacaggttaaaagcgacatccgagaagatgtgaacgacagcaaagatgatattaaagaagcgtctaaagaagtaaagaatgaattgaaggaaagtcgtaaaacaaccaaacttgagctggcagaacagcaacaagaaatcaaggaagaaatgaaagaagtgaaaaacgagcttaaggatggtctagaattgtcgtattaaagtcagctgatttttgttaatttacttgaaaataatcatcctattgaaaaagaccttccttcgcgaaggtcttttttattcgacttgctgccgaattttacgtttcatttctgtttggaaaaacaaggttaagagtgtcatcaagatggctccgacaaaaaaactgcttttaataatcgtcatcacttttgtgtctgctaaaaaacctatgtatggaaggtaaaaatgtggtcggccgatcaaatttcgttcatgaacaagtcccatctctgctttaacagaattgtctcctttaacaaaataaccgtctattttattgtcaaccgctaatactcgccgtgttttgatcgattttccctgattttcgtaataagtgattgtgtcgccaacatgaataggctccatcacatcctttacgaaaacaagtccgttcttttgatattctggtgccattttattgtctgaaatgacatatggtgtcacattcaacacttttggaataacgattgtcaaaatcgctaagagaaagatcgagaaaatcaatacagcatatactagtgttatttttctgcttttcaacactcggaaccacctccctttaaaggaaaaaactatctgtattcatcatatcacactcgtcaaaaaaatctattttttagtttctaattgaataaaattttgactgaatatcgcaatgtgttactattattattgtatttaacgattttgattaccttcctccaaatgaaagggtgttgtttatcattaccaaactaagcaaccaacgctttttaaaattctgttcaaaacaacgattaattttaataatattagttattttaatagtgatttcaactatcacattaaaaactattgacgaactaaaaaaaacaaacgttacagaattaaaaaaacattggacatttattgtcaagaatcattctgattactatatttacggaaacacagaccagcgattgaaaaatgtacaaccgaataatgcacttataatgcagcaacagctagagacaccactcaaagaacctcagctagttgttcggtctaatcatcagtgggtctcggtagttgtcggagagcggctcctttacaaatatgccgctaccgagaagcacaaggaaccaggcatgcttcagacgaccatccagctgccaaatgattatcggaaacacaagctgcggatcattacgaagacaccttatgaatattacgctgggattcctgctcaagtatttatcggaaattccacagaagtcagtcgattctttctgcttcgttcactgccacagtttttacttttaagtatctgctcggccttaattgtcctcatgctgggcttgctttttttaagaccgaactatacgaagaaacagttgctttcttctctgcttttaatcggttttacgttcttaattgggctgcaatcaatcgttctgaatgttccagcaagtaccttgttcagtccgaaaagcttgtcgattctttataatctgacggcgattttgattccggtttttctaacgaattactatttgctgcggacaaaaaaatatcagcactactatctctatggtgtcggttcacagatcactcttttgactgtcggaacattttgtattgctatcggaaaactatctttaccaattgcaatgcagattttcagtgggtttaatgtctttatgacgttatacacctcagcaatcgctttagctgaatctgccgatcagaatcgtttttatactatctgctcaccaggaattattatggctgcatttgtccactgttttttctacattcaattgtttacaggcgctgcaaatcttacaacagactggccgttagtgctgtttaccgctctaatgcttttaatctcaggctatcattttgaagaagaaatcaactatattcggaattatcgaataaagcagcaggaatttgcgcaacagcaacttatcataaaagaaaagcaaaagaatctattgatgacattcaacttattagctgaaaaagaagctgctagaaataagccagcagcctccctaacctctcatcttcaacaaatgcgagagtattatcaaaaagaattccgtaaacaagcaaaatttttctcctgtcagtacacagttgaagaagagacgaacgtgctaaacgatgaaacattgtatttgctgatccaactattcgaaaaatttctaagcgatccaagctttggaaccatcgatattttgatcaaacaggagcaaaatcaactaatcattgaaagcaataccagcgccttcactcaccactctcttgatgaatccgtcgtcacagaaaccacgaacgattcacatcaagaattggaacaagcggttaaacggtccaatggcgaatggcactggcaaaataaagaaaagcagcaatactttaagatcacactaaccctataaaaaaacggtctttccaaatgcggaaagaccgttttttattaataaattagtgatagaaaatcttctttggtaatattcccaaaataatgtgtcagatcaatttcatcgatacattcttctagtgcttttttatcgtaacgggtaccgatcaattggttttcaacatccttgatctcacctaaaccgaagaaatcaccgaaaatcttggctttttcaatttcaccattggcaacatccaaacgaacttcgattgaaccaatggggaaacgtttttgtcgttccaagttgaattctggcgaacgtccatagttccaatcccaattcttatagtattcctccgaaatttggttaatgtctttccagtcttcctcattcaactcatgagtcttcacctgatccacactatcaacaccaaaaatttgtaaaagaattgcttgacgaaattcttctgtcgtcattgcttgcttatctttaggtaaataatctttaatgttcgtcacacgggaacggatcgacttgatgccctttgatgcgatcttatcctttttcacctttaatgcattcacaacttcatcaatatcactatcaaacattaaggtgccatgagcaaacatccggccattggttgagtacatggcattaccagagaatttcttgtcctcaatcacaaggtcattccgcccctttagttgcgcaccctcaatccccagcttatgcaaggcttcaacgattggttccgttaattttttgaaatctctaaaggagttgccgtcatctggcataataaaactaaaatttaaatttccaaaatcatgatacacagcgcctccgccacttaatcggcgaacaacatggatacctttttcatcaacatattctttattgatttcctcaatcgtattttgattacgaccaatgataatcgagggttcattgatgtaaaaaagcaagattggttcatctagaggcatattttgtaataaatacgtctcaatagcaagatttactcgtggatcacgttctttgtcatttggtacatataacatagttccaactcctaacccctattaaggaataaattcgtttaaatctcaaaaactttatgcggctgagccaactcgacaggaattttcccgctagctgctgcagcttgtcgacgcagctcttctaaatcgccatgttgcggtaaatgagtcagaattaactttttaactgccgcatttttcgcaaatgtcccagcttcgcctgcggtaaaatgtgctttatgtttttcgttgccgtcaaataagtaggtgtcagctaagaatagatccgcctttttagcaaactcattaaaggattccagataacctgaatctcctgtaaacacaaaaacagcacctgttttttcttccacaaaacgcatcgcatagcaaggcactggatgaatcgtcttcataaacgtaacaagaaacggtccaagtttcaattcttctgcttcaaagtaagcacggccttcagtaacaccatccattgtcaaatcgttaaaatgaaattcatcttccgtatgtccataaatcggcaaaataggctttggtgtttgtgttggatacagctgccaataatattgcagcactccaagatccgcaatatgatcgtgatgataatgagataaaatcactgcatccaaatccaacggatcaagttccttttccaattctacaagagtcgaactgccagcatccaacaataagttaaatccgtcagcctgcagcaaataactgctggttccttgaccttcatacggatacgcgcctaaacaaccgagtacggtcagtttcatgctaattccccctgatcaattttttcctttaacgcttgatcataaaaagcagcacttgccgtatttacatagactgctacaaaaagcaaacccacgatcaatgcgacaaatcctaaaatgtaccagccaataaatgatagttgtaataagatatatttcccccagcgatcctttaataagatccacgcacgcttgatgcaatcgccgacgctcaaatcaggataatcaaattttacccaaacagcaaatttaaagatgatactaataattgttgttacaagtaaaaatagtaacgttgagatgacataaagtcctaatacaccaatgttcatcagcgtagaaacactttctgtgttcgttgttaatccaccagttgaaatcagcgatacatatacactgctaccagcttgcagcagtaacgggatgaaaaagatcgctgccaaaacatattgtacaatttgggaaagaatattgataatcatcaatggaacataatagccctgctgaaaaacaacaaaaatttgacctaattcagctcgaccaccccgcacgacatacaagctgacataatataatgagtagctaaaagcaaaaagtactaaaatacctaataaaaatgagattcctaactgaatattcgtattatcagtcatcgtagaaacattactaattgctcctgtcagcagcccgacaatcactactaaccctacattaattccccattgaccattaagacggtctttggctgtttgacgatattcactaagacgcataaagacactccttcttcgttttgttgaccttgattagcatgaatcgactgctctctggctttgaacagaataatctgactaaagttggactgatatccttttccaaaggcagcagcatcttcctatgactctgctaatttggctatttcttcgtttaatttctttattttttgttcaatccgttgtttttcaggtgcaatcggaacattcgcaaaggttaatcgcttaaatgtttgcaattcctttttcaagtgatccacttctgtacgttttgtatctatcttcgtagtcaaatcgcatttctcctttgacaggaaccaagggacataaaacaaacaacaacctgttttagttaaaaaattagtaattcttgatttctccaactgtatcatagtctaaacgagcaacaacttccgtcactaatttgacggtattaaaataatcctcttcgtgaataattgatgtatgtgaatgcaagtaacggactggtactgtgatagctaatgaaggaacaccatcacgcgtcaagtgcatttgaccagcatcggttccgccgccggcaatcactgtatactggaatggaatttctaattcttcagcaacattgatcacgaaatccaataattttttatgaggaaccatagatgcatcatagatcaaaatttgcggtccttttcccagtaccgaatctgcctcttttggtgtcatccctggtgtgtcacccgcagtacctgtatctaaagcaaaggcgatgtctggattcacaatatgcgaacttgttcgagcaccccgtaaaccaacttcctcttgtacatcactgccggcaaacagtacattatgatgctcccgttttgataaattctccaacacacgcaaagccacagccgtgccaatccgattatcccacgcttttgctagtaagaattttgaatcattcattcgttgatattggatatatggtgtgaccatatcaccagggcgaatcccccattctttggcttcatcatcacttgacgcaccaatatcaataaacatgtctttgatttcgaatggtcgtttccgagcttctggcgtcaacacatgtggtggtttagaaccaatcacaccatgaataaccttgcctttacgcgttttaatttcgacctgctgcgccaacattacttgattccaccagccaccaatcgtttgaaattctaaaaagcctttttcggtgatcttggtaaccataaagccgacttcatctaaatgacccgaaataaagactttcggtccgcctccgccaccatgcttggcgataacactgcctagtccgtcaaagaaaatatcgtcagcaaaatccttcgcataatttttaaagacttctctgacctcatcttcatttccagcgatgccacgtgctgaagttaaatcgatcaacaactgctcttcctgtttttccactcttactcctcctgctttgctaaaaaatataattgctttgtgtttgactatctaaaaaaataatcgttcaaattctcttataacgagaaagctggatagcgtttatccataaattagtataccattgtcaaaaaattctgcgtagtatgttgtataatcactacgaggtgatgaaatgacacgtttgttggcgattgaattaactatgatggtcatgctggaaaatgaagcaggggaaatcttggtacaggatcgaaagaagaaggattggcccggctggacttttcctggtggtcatgtggaaaaagaagaaggcagctatgaggctactttaagagaaattgaagaagaaactggattggtgatccaaccagttctgcgaggaactgctgaatggaacaacttagctaaggagactcgtgagctggcatttctttatacggcgacagtcaaaaagcgaaccgttcccaaagatctcttatgggtcaaaaaaactgatttaaacacacataagcttgcaggaaccttgaccgagttactaccaatctttttcggtgaagaacaacagatttactttgatgtataaaaatcagcgtatcctattgcggacacgctgattttccttatacttgaacctttttataagccaaacttcccttttctcgcatcgtaatcaaatggatcacccaaaatgctgccgcaaatgctaatagcacgccagattggaataggaatttatccaggaaggcttgattgaaatccactgtttttccgattaattcattattctgggcaaaccaataggtcggggtgaaagcagcaattttatttactacgtctggtaaaaactcgcttggtacaaagataccgccgacaaaacagctacccataataaagatattattgacccccgaaattgcatcctcatttttcataatactggtaaccataatcgaaaagcctacgattgctacaaaaaatgacactgtattgatcacgaagtaccctactacctgatcaaaactgtttctagtaaccaacataacgaaggctaaaaatagtactagacaaaagattgagtaaagtaaattgccagttgagatttttcgtgacagttttcgtcgcgatataggagaacagctattccgacgactgatttcctcgcgattaaaggctaaatttatcactgcataaccactgaaaatcgacataaacatcccataagccaatagattgtatatttgacccgaaacacgctgttttttctttttatgataggtcgaatcaaaatttacttttccatcttctttcaacgttatctgcgttttctttagcaagtccttttggctgtcttccggcatttgtttttgataggttaaataggtgtttataaaattattgaccgtcgtatctactaatgatttagaaaaggttgccggacgcgtcttactggctaatttaacaccttctccttgtgctaatttctcagaaaagtctttggggatttctaaaatatattctacttcatcaaaatagagcgcatcgtctaatgctttttgcgaagtatccttcagcgtaataagattatgctgcttagctaaataatcaacgaagcctttttcgattgctgaatcatcctctgaaaggatcgcaatttttgccccggttaatttttccgcgtctttggttagttgcccagcgtagaaaaaggtgatcacagccatgatgatgattcctagcagcaaactgcccttttttctttttaaaatttccagaattgctttataagtggtcatattgcaccttcctttcaaaagaataattaagcaggataaacaccacgccaaatccaatcagccaaatcaaattggtataaaacggcttcaatgattgatagtagaataattggtagagactttcactgattaaattaacgatattaatccggcctaaaaacggcagattcacatcgatccaatatttaattgactgggaacccatcattccagctaggaaactcataatcatagaaattgatatcccgatcgaaattttttgttgaaaatccagttttgaaaacacattaccaattaaggttccaaatgaaatagaggtaaaggcacctaaagcgcagacaagcaatatatagttccaatgatcaccaaactcaacttgataaacaaatcgataaaacatcaaaatcaaaactgtttggacaaagaataggacaaagcttgccagcatattggcaaacgaaacaagtaatttatttcgaggaatcagacataagcggataccttcaggtgattgattggcctgctggtcatttgcattgcgcagcccccacatgaatccatacatgatcgtcataccgactaatgtaaagaagtagaaggatttcaaattgaaattaccagtaccatttccatcttttatatagctctcctgctgaagcagctggctgacctcttgcggttgaaccttcccagttgccaataaggtttctacctttttcgtattttgtaaatattgattcaatacttcttttaaaacggtctgctgtgtgtcgcttttactgacaaacagctcaatctctttttcatcaattgtaaaataaccggaaagcttatcatcggataactgctcttgagcttttttcttagtcattactcggcttttaaaaaccactttgccatcctgtttgatttcctttaacacattttcaaagcgtttttgattggcttcattagtagaaacaattccaactgttgattgttctatcccaccaatcttatcgagatcgccaaaggctagattaaacagcagacctaatactatgggaaaagcaaaggtccaaaaaagcaagctgcgatttcttaacagaacacgtaatcgatacgtaaacaaacgaataaacatcttagctcccccctaatctctcaattcttttccggtaatttctaaaaagacatcatttaatgtcgcttcttgtgtatgaatattggcgtacataattttttcaacttcgaaataatttaaaattggcagcaaggcttccttcagctctttcgtcgtcacacttaaatagttttcatcataaattacttcgataattgatggaaaagctcctaccgcctcaacttgttcttgagatagccccggaacttcaataatcagtttttcattctcacgaaccatgtttttcaattgttctttgctgccttctgcaatcacttgtccttggtcaataataacgatatggttacacaaaatctcgacctcttccatataatgcgtcgtataaacgatcgtcgcacccagtcgatttaactccttgatactatccaaaattttgtttcggctttggggatcaactgcgacagttggttcatctaaaaaaatcaattccggcttatgaacaatcccgcaagcaatgttcaaccgtcgtttcaatccgccgctcagctgtttcggataaaatttacgaaactcctctaagccaacaagctggatcacttcttcaacatattgttcgcgtttagacttttcttgaacgtacaatccacaaaaatagttgatattatccgttactgtcaattcttcaaagaaggctatttcctgagggacaaccccgatcttttgcttaatgctatacttttccggtcccatttcttctccaaaaatcttgattgatccgcgatcataggtcaataatgaaagaatacaattgatagtagtggatttgccgctgccatttggaccaagcaatcccaatatctctcctttttttacagataaatttaaatgattcaaggcggtgaaatccccataacgttttactaagttctcgatttcgatcaacatttgaaaaaccccttttccttttcttcttacatttactataatgaaaataagcatttgcttgtagtgagtttgcgccaatcatacgatgacaaatgtcatttgatccatacaaatttctatctaaatcaaatgattcaatgtttgatgatgcaaatcgaacctattttccagtaatctgagaaataaatcctttaatacaaagtaggagccgcaatgaaaaatttaaatagttattcaatagattttttctttttagaattaattggtatcctgctgctttttcaacaggattttaaaccgcaaatggtagtttatttgttggctagtatcctcttagctggtcccgctctattgctgaagaaggctttagggcaagcattaggcgtttttcctttactaatcctgagttttttctggccgcccctgctccttttcttgcccgctaacctgcggatcgcttggcgcgaagagattatttggagctgggcgctaatcgtcttagcagttcccttattgcaagatacctactcttcaccagagcgtatgctgattatacttttgagtagcttcgcgatccttttagcctggcgtggaaaaaaacaggtcgaagtaaaagaagccttgctgcaattaaaggatgacagttgggaaaagcaagaactgttgaaactgaaaaatcaggagctaatccaatcgcaggaaaccttcatcgatttagaaatttccgaagaacgaaatcggatcgctcgcgacattcatgataatgtaggccatctgctatctagtgcgattattcagcttggcgcgattgaagcgatcaatcaatcggagaagttaaaaaaaccgttgaaccaattacggacaacgattcatacagggatggataatattcgcgaaagtgttcatgatcttcacgagacctcactttccttttcgaagggacttgagttgttaatagcagattttcaattttgtgaagtggagattcgagggaatattccagaaggtatggatcaggagcaggaacgaacactgcttatggtgcttaaggaagcatttgctaatgtgatgaaacatagcaatgctagcaatgtaacactttcatttaacgagctacctgccttttatcgactgcaaattcttgataatggaacacttgctaagaaaagtggagatggcattgggttaaaaagcatgcgtcagcgcgtagaacaaattaacggacagcttcacgtctcacaaactccggataattttctgattcacattgttttgccaaaagatagtcaaccatcctttcacaatcaccatcgaacaagaaaataatattctatcctgctaggaggaggtatgtcatgattcgcgttgttgttgttgatgacgatccgttagtaacggaatcattgaaaactattttagaaatatctgatgaaatacacgttgttggtaccggaaattctgcaccagaagccgtcaaactctatttgcaggaacgaccggacgttctattaacagatattcgcatgggaaatagcaccggtatcgaagccgcaaaagcgatttttaaacaggtgccagaagccgtcatcctattactgacgactttttccgatgatgaatatatccgagaagccctgcagatcggtgtcaaaggctatttaatcaagcaggagctgggcagtatcgttcctgcaatcaaagctgtatacaatgggcagacagtttttggaacagagatcgttggaaaattagcttcgatcttaacagatcaatctcctcaaaaacaaccagtcattgacttatctgaaagagaggaaagcattctcattgcagtggcaaatggcaaaaacaacaaagagatcgcccaagagctcttcttaagtgaaggcactgttcgtaacaacatcagtcagctattagataaattaggagttcgtgaccgaacacagctagcgatcttctattataaaaattatcaataagaattgactagagtcctaaagaatatttttctttgggctcttttattctgccatttgaagaggcaaaaactatacgcacctaaaattaaatcactcatcttctcttcttcttaatactactctccttatttttcccattgtgctctttctgataccaattctcaatcaaactctggacataagcctctttatgcgtaagcaatctcttctttttagtcctctgcggttttgtcgttggtggagcagaaacatcgtctatggttttcggtgtaactttgtcttttaacaacgtttgtgaactctgcgattctatcacaggttcgagaaaagatttctggatttccagttcatcatctgctggttcttccgtctcttcttcagtaaatataacacggatattttccaaactaaccacatcaggatgtccgacgcgaaccattgtcagtaaatcctgatcattcatcgtactcagatcaacacctgctggcacaacgatctcgatcgtcttcacttctggtgtttctacttctgaatttaagacacactcttcctgttgatctgctggttgttccacctgatcgacttctacaactgtctctttaaatgtctcttttgttcccggacgctttgcttgaataaattttacaaatcgtcttacaccagcagctgtctcaaagagtgccacagtcgttaggatttccagaagttcagaagtttctgcccttgagcgtgtttcgtctgcatccgcaattgttaaggtatgctttttacctgacgcgtcttcaaaggcagaaatgatccgaagagtcagcgctgaattctgagccttctctgttccaggagtatctaaaagttttttatttgaacgagcttcttcggttaaacgatagtattcctttttgtcgttaaacaagcgatgaacgaccttatcccaatctccgctttttttgaaataatctttaaaataggcgcagtattcacgcagcacatcactaggctccgctgtcagaaacacctcacaaaccaattcttggcaaagaaaagaaaaatcactaacaacaagcgaatttcgtaccatgacaactacaaggtatttaatgaatgtagcaacatcttgagaaaatttaaaatagctagtaattttcgcctcaagtgtggctctttttacaccaaacaatgttctttgtaataacggttttttctgctcaattgttttcattaagaaatgctccttccagcgatgtatgcgcttttttataataaaattataacattatcaataaaacaaaagtaaatttagcataaatttggagttatttacttttttctatagaaaaagaaaaattatcatttcctctttttagctgtattttattaacacaattaaaatcacaaagccatttaaccataacttttctatgttcgttattagaacagaaaaaaagaacacctcaagacaaaattaagtctcaaagatgttctgattaatgtttgtgaatcaccattaaaatctctaaaaaagaactattttagatgaaattaacgctttaaaaccgctctttttctttactaatccagccgataaatcagacaatcacaagttcacaagcgtaatttccctatttctattttatcgcttcgggattcatttcttgccattctttgcttaggaaataacgattattgatcgtataattctcaccttgagaattagagctcttcaaaaatggagcaatttctttatctgccgccagccagcccttccatcctaaatgaatcgtatcttgcataaagtagggcgtattttgctgagttgagtagtcagcgatattggtaaagccctgcgatgttaattggtatttgattttagcagaaaattgctgcagcatctcatcagaaagacccgtaaattttgcccagcggccattgactggtggaatgataaagagtaccttcgcatgctttttcgctaattgatcaagcgccaattgaaaatcggaaaactctggagaatagcgataatcccattttcgttgcgaattggcaaatcgatccatatgtggttcgatcctgcgtttaaagaaatgctgttgaatcccaaattcatttccttgggtcgcctgcttgcctaaacgattggctaactgattcaatttatggggatcataattttcaggcagtgctttgacatttttatcgatagccttctgcttactaatcatgccgattgtactgaacaattcgtcctctcgttctaacatgtttaattttagtctgctgaaggtgacatccgtttggtctggtaaatttcccgccatcactgcatctagcattctttctaaccgttcatcttttcttaccactccatagtgagtcaagcgttgagccaaatatttatcactagattgaacttttttgagattcattagccaagtcaaggtctgctctggggaataataggcatcaaagtaatcacgtttgatcccatttttaacaaaccattgtggggaaatgatgaatacaaccttgcgatccttcaactcatttcccaatgactgcatcatcataaattgggtcaatgattgggttccaggcgctcccatcaaaaaaggcgtgtagccgcgatcatacttttcggctaagaccgatggatggaagggactgattcggctcaattcagaagagccgaaaaatgggacgtaatgatcggtacttagagcttcttttgtaatactgtttcctcgcaaaacatttccagccattgaacttgaagcagctttgatcagctttggatcattgctgttgattttaaatggggaaaaaaacagaagaaccaataatactgccgctaaaagaatcggcccaaagataccgaaaagtttctttttcattaagcctgtaaagctttcacttgttcaataattttatttggtgtgttccattgcgcgcggtcaaactctgaaacaggtacttgcacatctaactgtccttcaatttcaaccaatagctgaacggttgctagggagtccatcaatccttcctcgaataaatctacctcaggattttctcgaacttcctctgttcctgtgatatcttctaaaatactaaataatgtgtcttccatgttactcgctccatttcgtttttttgtagtctagctgtttatcttcctagaaagaaattgtgaaatattaatttatccaaaaaacctgagaagatcaaaaagctcaagcagacggcgttgaaggttaagaaaatcgccaacgcatgggtaaatttattggatggaatctgcttcttgtgtttcttcttgaatcgcagccacgcatctgtcaaacaaatcaatgcggcatgatagaagccatacaagatgtaataccaagtcaagccgtgccaaacgcccatgatcaggaacaaagcaaagtagccgacatttgacgcgacgatccgactcttgaaggttttctttttaatcaaggtgaacatcaaacgcatataaatataatcgcgaaaccaaaaggacaaggtcatgtgccaacgattccagaattctttgatgttccaggataagaacggcttattaaagttcggtggtgtctcatatcccatcagcttgctggtacctactgcaaacaggctgtagccagcgaaatcgaagaacaaatacatactatagacatacatatagccgactaggccccaagaaataccaccatgctgcatcgccattcgatcaacgattggcagaagcacttgaccaaaataatagccgattacaaatttatataaaaagccgacaaaaatatcgtgaacaccagcacctaataaatcgacgtatttttctggtgtaggcggctccttcaaatccttttcaaagcggcgataccgatcgatcggaccagaggaaatcgttgggaaaaacagcaggaacttgatatagttcaacgggctgtattccttgatcatcccatcccgcatttccatgatgatctgaaccgatttaaaggtcagataagaaatccctagaaatccaaagatggagttttctccatctataaatggggtgatcttaactaaaatcaaaggaacgatacttaaaaatacggctaagtaaaagatgcccgcttgattcttgtttttacgataatggttgtaacaccaaacaagaatactttggaagatcacgtagccgatcaatgccagcccttggcgataatcctttccgccaaaagaaacatacaagaagaacagtgtgatcagtgactggtaccagccgattcgtttaccgcgaatcagtagacttattatcagcggcaacagtgccacacataagataatgaaataaatcggtgacgcataaggcaccatgtgaggaatcaacatcagctattcacctcgttaattagtcgcttgcgatcaattttgccgtttgccgtccgcggtaattgatcgacatagacaaatttttgcggaatcatgtagtccatgacagcttccgctaattcttctttcactgccttgcttagctgatacgttttctcaaagtcattgtcattggcaacaacataagccactaattgctgaaccttgtggtcttgatacttgggaaccactgtcgcctgcttaacataagaaacctgttctaaatgatgatcgatgtcttccaattcgattcgaaagccgtgcagcttcacttgaaaatcaatccgtccttcatatagcagtaacccatccttctgaagtcttccagcatctcctgtacgataagcaggaacgccatcgatcttgaaaaaggcagctgccgttttttctggattatgcatgtagccctttgaaacactcggacctttaataatgatctccccggcaatgccgtctgttactgctcgatttccgtcataaatcagaacttcggtatcttctttgatataaccgatcggcacacgatcatatttgcttaacacctcttcagtcacttcaatttgcgtcatggcaaccgttgcttccgttggcccgtaagtattaaagaccttcgcatgcggaaagcgccgtaataactcttctgccgtctttcttggcagctcctctccacagaattggaaaatcttcagtgaaggcacatgttcgccatcaaaggtcttctccattagacagatatccatgaatgacggtgttgatacccagacctccaaagctaaatttggtaaaaagttgaataatttcttgaaatcattgatcactgctttttccatcggaattaatgttccaccgctgcaaagtgcaggatagatactcataacggataaatcgaaggaatagggtgcctgcgataaaaaacgcatgcccgcttcgatctcaaaatcctttagattccaatttacaaaactcaataaatttttgtgactaatctgaacacccttcggtaccccagtcgttccagaagtgaagatgatatagaaggtttcatcgcccatcactggctgcaatttttcatatgcatgttctgttgtaaaaatctcagctagtttttcaggcgacacgactggaatcgtcacgtttaattcttctggccaaggcaaaacacttaaaatcattgctggctgtgctacctttaggatcagttggatacgatccaatggggtagttgattcaatcggaatataggcatgtccgcttttggccgctcctaagaaactggcgatcatagcaaattccaattctccgaagacaacaatcggtgttttagcttctatattttgattcaaatagtgtgctaagttatctgaccactgacgtaatgtttgataactgaattcttccttttctgattgataagcgagtgcctctggcttttcattagcccattggtcaatcgctgtaatgatattttgcatgttggtccccttcccgttcagttcaagaacgaactcttttcaatcgattaaaattcgttatagataaaattaccgccttggatactcttgtaatggtataagtaaacgagtattaaaaggacggcaaagtagaaaagcgtctttccaataaaacttaaccagtaacgagtagcggggcgtttaaaaaatttcttcatccgatcgccctctcccttttatttagtactcattataggaggatgccaaaaatctaccatttgtttttcttacatataccgctttcaaacgaacagttttgtcacattggtatccacggcgtttagaacatttttttaatggaaaaactgcctgctatcattggttttctgccaatgtaactgggaagataactagacgaaaaaacaggatataccgaatatcgatacatcctgttcttaagattttatgaaagctttttctgatatacgcacgttgcccaataaaatagcgcatagaccaccagcatcagtccacaaaacagatagacaaatccatagttggcatttttggcaatgtgagaaatgaccgagatagctaacatactatgaatcagagccaaaatcgctggaataaagaaaaccactcgattttcacgcttaatttcttgataaattgttttatcgggtattcccatttgtcgtaataaaccatatttctttcgcttttgcttaaactcagaaagttgccgcagtgtgaccatacttgctgtcacaatgataaaggtggtggtcacaaaggtcactacgaacagcaccaaccccatactgctgcgagtcattcgataaacttcttgatacgaggtatactcggaacgatataccgtcgacccatctttattagttccttctccttctacaatatctccgacaatctgttcatttttccaagtcagatcataatgtatcggataatcccaatcgcccttcaggtttgcacgaataacctgattcagcttattctcaaaacgatcttctacatcgatcacctctaacgcataagaaatgcctgataattcatcaaaaagttcatcagaaacgacaatcattcccgtaccatatcgcaagctcgtatcaccaaaaaaattggggtgcgtttcttgaacctttagcttctgacttttcaaatatatgattttactgtaacgagcataatcattcagataacgctgataggagctcaaaacaactgtcgaatcagcagactttaactgaatattctgcaaggtaggattggtttttcgaaaagccagataatcagatatcgaaacgacatccgtaatttccggctgagaatttacaccctctccagaaattgctacgctttgtttggctggcactgcttttaagtgtaaggtctgccgttgataaggagcaacgctttgcagcttcggttctagcttctgatagctttgttgtgtcatcattacagaggccggagcaatttcatcaactaaacgcatttgtagtgacacaagtgccgccattccccctaaaatcgccaatgctaaacctaacgcaactgtgatagaacccaaaaaacgccattcactaaataatcgtaattgccattcgcttcttgatagcattcccaaatttttgtttaagcgctttggccgataggaattataccagcgcaatgtaaaagcaaaaaataaatagctgccaaatacacatagtaaaaagatcaagcccattaacaaagcattgcctcgaagcaagccgaaacgatcactggctgtccgggaaaaaacaacataggtcatcgccattccccagccgcttaataaaaagagagccccgatactaccagcgattttctgcggcaaagataccttcatcgcttgaattttacgtaagcgaagcgtctttaaatgtgaaaacttagaccctgataccagccataaaatctggaaagaaacaaccgccaatataaagagcaccactaagccagttgctatgatcgcatcggtcgagaaaaagaaatgcactcttagcggcaggtccatagctttcacaagaatcatactaaacagcttagaaagcaaaactccaacgccgatcccgattacaaaagaaaaaatcccgataaagaaaatttctaaaatgaaccagagacaaatctgatagtagttcaatccatataaatggaagatgctgatatcctttcgccgattttctataaaaaaacgattggtattcgtcataaaaaacagcaaaatcagtacaaccgcaaaactgccgaagcctaacatcccaactagctgtgtattttttccagcactgcgaattaacggctgctcataggtcatcgctgtaaaagaataataaaccattactgcaaaaatcagactgaagaaaaaaatcaaatagttcgacaactgctttttaaagcttcgccaaacgattttaatcagcattggcttttcctcctccgccgatcgttgcctgcatatcaatgaccttttcaaaaaaatccttgcgagaagaacgccggacaatttcagagaaaaaacgcccatctttaataaacaatactcggttacaataactagcagtgtaaggatcatgggtcaccattaagattgtggtttcctcatgaagattcacctcatctaaataattcaaaaattctgaagcagacttagaatctaaagagcccgtgggttcatcagcaaacaaaacaaatggacggctgatcaaagcgcgggccgctgctgttcgctgctgctgcccgatggatatttcttccgggtaacgtgctaagatctgctcaatcttcaaaattttcgtcaaccgaagcacccgttcttcaatctcttcattagagagcttactgacagtcaatggcaaaataatattatccttaactgttaaactatcgattagattaaagtcctgaaagataaatcctaaattttcccgccgaaaatccgtcaaacgagcctctcgcatctgggtaatatctgctccgtcgattttaacggaacccattgtcggcaataaaattgtggagaggatattcatcaaggtcgtcttcccagctccactaggtcccataataccgatgaactcgcctttttctacactgaagttcaggtcatttaaaaccgtgactttattgtttcgtgtgccaaagcttttactaagatgctgcacatcgatcatttttttcatgagtgcctccttattcgttttaatgtaattatttttttctaaaagaaaaaattaggttgattcgaatgccgtatatcattcaactaaagtgttcaatcaatgtattagctaattttgataatttcttttttgcctacgtctcctgcaaaaagttgaactgacatccttattcgttttaatgtaatcattttttctaaaagaaaaaattaggttgattcgaatgccgtatatcattcaactaaagtgttcaatcaatgtattagctagttttgatattttctcttttgcctacgtctcctgcaaaaagttgaactgacatccttattcgttttaatgtactatttttctcaaatagaaaaatgagttggcccttgtctgacgcagcagtgatcaacatattcaaaaaattaatatgacgaatacttatttttaatatctaaatttttttctttatggtatcatatttgaggcggattcctatgtgaaacgtccttcaatagtcttacaattttttcacttttttggaaaaatatttttcagttattttatcataaagggaagcttgacctcatcagttttcttatatctttcagtaaacgagcacactatatatagtgtgcttttctttttttgacaaaaaataatactatatatcgttgcaacaaactcagaaatgctatatgattgataatgaactttaaaggaaatggagtgtttgcaatgatggaaatccacacaaaagattcgttgttcaacgaatatcaaccgtcgctaaaaaatattaaggtcgtaaaacgtgatggtcgtcacacagcatttgatgatcaaaagatttatgatgctttaatcaaggcagaaacgaaaattaaaggatctgttgatccattggctcatgaacgtatccagtcaatcgttgagcgtgtagatgcagaaatttcagaacgttttactagcgatatcaaaatatatgaaatccaaaacatcgtggagcatacattattagaacacaacgaatatgaattagcggaagaatatatcaattatcggacgcgccgcgacttccagcgcagcaaagccaccgatatcaactttacgatcggaaaattgatcaacaaggatcaaaccgtcgttaacgaaaatgccaataaagatagtgatgtctttaacacgcagcgtgatttaacagctggaattgtcggcaaatcaattggtttgaagatgctgccgcctcatgtggcgaacgcgcaccaaaaaggcgacatccattatcatgatttagattatcatccatatacaccgatgaccaactgctgtttgattgacttcaaaggcatgttgaacaacggctttaaaatcgggaatgcggaagttgaaagtcctaaatcaatccaaacagcaacagcccagatttcacaaatcatcgccaacgtggcttcaagccaatacggtggctgttcagcagaccgtacggacgaattattagctccttttgcgcgtctaaattacgcaaaacacttaaaagacgctgaagagtggatcgatgaccctgaaaaacaaaaagcgttcgcgaaacaaaaaacacgtaaagatatttatgacgcgatgcaaagcttagaatatgaaatcaataccctatttacttcaaacggacaaacgcctttcacttctcttggctttggtcttggaacagactggtttgaacgtgaaattcaaaaagcgattctgcaaatccgaatcgaaggtctaggcagcgaaaaacggacagcaatctttcctaaattgatctttactttgcgtcgtggtacaaacttagaaccaactgatccaaactacgatatcaaagaattggcgttagaatgtgcaactaaacggatgtatccagatatcttgaactatgataaattgatcgaattaaccggcagcttcaaagtgccaatgggatgccgctcattcttacaaggctggaaaaatgaacaaggagaagaagtcaacgcaggtcgtatgaaccttggcgttgttaccttaaacttaccgcggatcgctttagagtctggcggcaacaaagaaaaattctggtctctattagaagaacgcctgcaaatcgccaaagacgcgttagtcttccgtatcgatcgttgtaaagaagctacaccagcaaacgctccgatcctttatcaatatggcgcgttcggcaaacgtctgaaacggaccgatgcggttaacgaattattcaaaaataaacgggcaacgatttctttgggctatatcggactttatgaagtagccagtgtcttttacggcggcgaatgggaaaacaatccagaagcaaaagactttaccattgacatcatgaaagacttgaaagaacacgccgatgcatggggcaacgaatatggctaccatttcagtgtgtattcaacaccaagtgaaagcttaactgaccgcttctgtcgtttagatacagaacgttttggtattgtcgaaaatattacagacaaggactactatacaaatagtttccattacgacgttcgtaaaaatccaacaccatttgaaaaactagactttgaaaaggattatcctaaatactgctctggcgggtttatccattattgtgaataccctgttcttcaacaaaatccaaaatcattggaagctgtgtgggattacggttacgatcgcatcgcctatctaggaacgaatacaccaattgaccactgctacgaatgtggcttcgaaggtgacttcaaaccaaccaaacgtggctttgaatgcccacaatgcggcaatcacgatccaaaatcatgtgacgtagtcaaacggacttgcggatacttaggaaaccctcaagcacgtccaatggtgcacggacgtcacgaagaaatcgcctcacgtgtaaaacacatgtaaaaaaaaactcaacgaacattcttcgttcattgagccaaacagaaatacgattgacagggacggcgctctttgccgctccctgttttacttgaaaggggaaaaatatgcgtaatcctaaaccaaaagaatggctggccagcgagttgagccaacaatatatcgcagactacaaggccttcaactttgttgatggcgaaggcgtccgtaacagtctttacgtcagcggctgtccctttgcctgtgaaggctgcttcaacgcggcttcgcaaaattttcattacggcaagcctttcactcaagaattagaagaccagctaattgcggataccgctcatgactatgtccaaggtgtgaccttcttaggcggtgaacccttcttaaatacgcaggtctgcttaaaagttatcaatcgaattcgcgctgaattcggcgatacgaaggacatctggtcttggagcggctacacctttgaagaactgttgttagacagcgatgataagctagaaatgctaagcaagatcgatattttagttgacggtcgtttcgaactctcaaagaaaaacttgatgctacaatttcgtggtagttccaaccaacgcatcatcgatgtaaaaaaatcattggctaaaggtgaagtcgtcatttgggagaagcttcatgactccgaaaaagctttcgagcaaatcaaaaagagcgaactaatttgaacgctcttcccacaaaggcaacacaatattttcaaatgcaatgggatcaagattagtcagagtaattccgactaagcggatccctttttctacgccgccaatctcctcccaaatcaaactggcctgtgaaaacaagtcttctttcttttctatgtaataaggcaaagtgacccgtcgtgtgactgtcgtgtaatccgcatagcgaactttaagaacaaccgtcttgccgtgacgctgtacgcgttttaaggagccctcgactttttccgccaattgccttaactgacttaacacctcatcatctgtcgataacgggcggccatacgtatgttctttcccgacagactttcgttcacgcgtgatactaacaggtgaatcatggattccccgtacctttcgatacaaggaatagcccatcttgccgaattcttgaatcaggaacatttcactcttctcgtacaagtccgctccagtaaaaattcccagctcattcattttaggaacagtcttcttccctacgccatgaaatttctcaatcggcaaacgttttaaaaagacgacggattcctctggcgagattactgtcattccctgaggcttttggtaatccgaagccagcttggccaggaacttattgtagctgactccagcagaacaggttaattgcagctcctgccaaatctcttgctgaatcagacgagcaattttgatggccgaacgcgcattgatcttattttccgttacatccagataagcttcatcgatcgacaccggctcaataatatccgtatagcgatgaaaaatttttcgaacctgttgtgaaacagcactgtacttagcatggtcaccaggcttaaaaatagcctgaggacacaattcatacgccttctgggcactcatcgccgaatgaatcccataaatccgagccttgtaattcgccgtcgtcacgacacccttgccgccagtatcagaaggatgacgagcgattactaaaggatgcttcgccagttccggatcgtcccgttcctcgacggaggcaaaaaaagcatccatgtcaatatggataatttttcgcgatgtatcatttttcaaaggaaaaaccaaatctgccattctgctctccccttcctatcttatcttcattataaccgaacgtctgttcagagacaattattcccactagaagatagaaaaacataatttctgcaaaaaaaagaacaacctgtcctatcaaaaacaatagaaacagcgttgtccgaataagttttttaagtcaattaccttatctctcgattaagttcactttgcgaatcatcagcttgtctgccgatccgcgttggaactcctgcggctcaccaaaaatttcagcatagatgaccttgttgtgctcccgccgccttagctggtagatgatctttccagtatcctccagctccttcatcatttctgtcacaccgccaaagccggttttcttcgtgataaaaccagtcgccaccatgcgttcatccaaatagcgcgccgaaatcaccgaacctttggctaatgttgttcttagagctgtcgctaattcctctaattcttcaggaacaggtaattctcgttccactggttgatataacgtatctcgcaaggtatttaactcctctactaaggcttcatactgttccttagtcagcatcacaccagcgattttttcgcggttaaaaatataaaccccggtctctgctttacgagcttgagcaaaaacatccattggtgatttttttacttctgtaattgaagatgtcggaacatctaactttcgcaatcccattctgctctcctcctacttcctagcccttcaaatgaaagaactaccccttattttcaactgtatccccttctacaaatcacgcgaatgttcaagaaacacgtgaaatagaatgacactcttatcgtagtcctcatcattatagcataacctttctttaagaaaaatcttgatccaattttccttaatcagataataaaaccgtctgatatctctcttgaatcaataaagaagagtctaaagtgggcgtcgttttcaaagcaacttgatgacttgcaaccacaatgtttttcaaggccaaagccagcccttcattttgacaattccttagcatcggaatttgccgctttacttccctactaagatgatcataacttgacggaaccggtccctgcttccattttaaattgaagagtagtattggaagtccttgagatagtccaaagaaaagatcaaaaagctttacgttgaatgtactccttaatagttcgccttccaaagcaatcgtttcttcaataattctactcgccttcctgacttcctgatataaatcagtctgatattgttggtggcaatggtaaaactcagtaaagctttgaaaatgatagcgcaaatgatcaaagaagaaaaactctgttaaatttccctgtaaatcgaatttttcaatgaatcggctgattagtactttatctggatacaatacctggttcactgaaggtgttggttgatctttataatactgttcgatttgctggtagacctcgccttcttcaaaataataaaaatctctcaaatagcgtaattgtaacaataaaatgatacctggatcacctaaaagcctgcctgctcgtcgatttacccaaaggttcaaatgaatcagttgtcgattcagttctctcatttttgtgtaatctgtgtcagcagaagtctgttgccaaagaaattgtttgaaaagtttaaagcgtggatcttctgttaacactttccgatgaagctctaagaaatttggatggtgctgccgattaattcgccatggttttccttttatcacatagcccttttgctgtaattcatcactataacgcatcgctgttcgaatactcacctttagttgcttagccatttcagtaatcgtgtactgttctttatttattaattcaagtagctgcaaatagccctgggttttctttcttattataaattgccaaatcatgccttgtgtctcctcttttactcattgaatttcctcttctttaaaaataacataaatagacacaaagttttttatcaactttttttcaaaaaaaaaagcgtctgaattctcagacgcgtaaagtcatagcatttatcgccacaataatcgtacttaaggacattaaaatcgcaccaatagcgggactcagtaaaattccgataggtgctaaaatacctgccgctaaagggattgctaaaatattataaccggcaccccaccaaagattttgtatcattttacgatgtgttttcttcgccaaacggacaaattttaaaatatcctgtaaattgctattagtcaacacaacgtcagccgaatcaatcgcaatatcagttccagcaccgatcgccattccgattgtcgctctagctaaagcaggagcatcattgatcccatctcctaccatcatgactttcttaccatcatcggtgtagcgtttaataattttttctttatcatctggtaatagctcgccaaaaaattctttaagacccagataatcagccactgcttttgcagcctcttgattgtctccagtcagcataacaggttcgattccagcattacgcaagtctttgatgaacgctttggcttgtggctttatcgagtctcccatcgcaaagaaagcaaccagctcttcatcaattaataggaaggaaatcgtatttccctgtgcttggtactccttcaatttttcttgatcaaagctcaatgcacggcgttcgatttctttttgattcgctaaaatgacctgatgaccttctactgtcccgcttacaccgattccctttaaggtcgacacctcttgtgcttgataagggtcaataccttcagctttcaaataattcataacgccaacagcaaggggatggttggtttgcgcttcaagggctccgatatatttcagcgcctcttctttacttgtctctgccaatttctcaatccctgtcaccgtaaacttaccctctgttaaggtgcctgttttatcaagaaaaacataatctaattgatttccctgttccaaggcttgacgacttttcagcagcaagccatttttagccgctaatgaggtggaacgagcgatcactaaaggaatcgctaaacctaaagcatgcggacaagcgatgacaaaaacggtaaccattcgatccaatgcttgtggcaaatccgctacaaacagccagacagtaaaagttagaagcccagcaactaacgcaatgtagaataaccatttcgctactttatctgaaattgattctaattttgatttttcctgctgagcttgctgtaccattgtcatgaccttggcaaggtaaccatcttcgccagtgccagtgacctttactctgatcgtaccatcaccgttgaccgaaccgccaatgactgtgtcaccgacgttcttttgaacacctttggattcaccggtcacagccgattcatcgacaatcgttgtccctttgatgatctgtccatcggtcggcattttatctccagcacgaactaagagcatgtcaccactcttgatttcctgaagcttgaccttttgtgtggagccatcttcttggatctgattcacctcgtccggcagtaattctgctaacttcttcaaggcattgctggcattggatacggcgttcatttcgacccaatgacctaagagcataatgacaatcagtgttgccaactcccagaagaaatccatcacgtgctcatgaggattcaacttattggcaataaaggaatacaaactatagatgtaagcaactgtaatgcccattgcgatcaacgtcatcatagctggactcttcatcttcagctccattttcgccccactcaagaagggttgtccgccgtaaacaaacagaacagttgctaacactagaacaacccactcagaacccggaaaagtgaattggaagggcaactgcattcccatcatcggcgaaagaacgatgatcggaatcgataaaacaagtgagagccaaaatttttgtttgaaatttcccatatgcatcgaatgatccatgcctccatgcgccatctcgtgatggtcatgtccactcatttcctgattcatattgtgatgatcgtgtccattcattgaatgattcatttcgtgatgatcatgcttggaatggtccattttcatcgattcatccatttgatctccttgtttcatgttgcatgcctcctattttttacagcattcttatcctgagagaattactttctgttaaagcttcttttgattcaaactaagagaattgagcagcacactgaccgaactaaaggccatcgcaccgccggcaatgataggattcaaaaagcctaaagcagcaaaaggaatcccaatcacattgtataaaaacgcccagaataaattttgcttgatttttcttaaggttaatttggatagatgaatactcttttcaaccgacaaaagatcgctgttcattaaggtaatatcggcggtctccatcgcgatatctgtaccactgcccatggcaatgccgatatctgctaaagccagtgcaggcgcatcattgatcccatcgccgaccatcccgaccgattgaccattagactgaagctctttaacaacctgagccttatcctccggtaaaacttctgcaacgatatctgatgcctgtaagccaacctgttcaccaatatattgcgctgtctgaggattatcacctgtcagcatttttaccttgattcctgattgatgaagagcagcaatagcggctttagaagacgctttgacttgatccgttaccgagatcattgccagcattttcttactgtcagttaagaacatcaccgtttttccttcttcttctaacgctaacacacgatcttcaggaaatgaaatgtttcgctctttcaagccgcgttttgaaccaacaaaataggattgcccattgattacgccggtaacgccttgccctgttaagctctcaaaattgtcgacgggcaagatttcaacctgatcttttccataatgatagattgcttttgccaaaggatgctctgaatgctgttctagacttgttaaataagccaaggcctgcggatccactgcttcaaaatctgctactactggcttgccttctgtaatcgttccagttttgtccaaaacgattgttgtcaggtgagcaattttttctaacgcgccgccgcccttaatcagaattcctgatttcgcgcctaaacccgttcctaccataatagctgtcggtgtcgctaaaccaagtgcacatggacacgcaatcaccagcacagagacgctatggacgatggcctgttgccaatcaccagtcactaaaccggtcgcgagcaacgtaagtaacgccaatcccaatactgtcggaacaaaaatactagagattttgtccgcgatctgctggatcggtgctttttcaccctgcgcatcctccaccatccggataatccgtgaaaggacggtcatactgccgacttgtgtagcactaaattgaatgctgcctgtggtattaacggtgccgccaaacacttgatcgtctacctgtttatccactggtaagctttccccggtaagcatgctttcatcaatcgttgtctgtccttttaaaatctttccatctaccggaatttgttccccaggacgaaccctcaaaatgtcaccaacctgtacctcttcgattggtacttccttttcttcgcctgccacaacaatcattgccgtcttggcttgcagactcattaactgcttgatcgcatcactggtcttggtcttagctttttgttctaaatacttccctaacaagatcaaggtgataatcatgccgctgctttcaaaatacagatctgaattgtgaggattgaagaaaccattatacacacttaacgcaaaagcagccgaggttcccatcgctaccagcacatccatattcggagctttggttttcaacgcatgatatgccccgcgataaaaacgctgcccaacaccaaattgcacaggtgtcactagaattaattgaactaatggaaggtgtaaaaagtgtacccagcctgcatgactgcctaaaagcatcgcgatcatggcaatcatcaaaggagctgttagtaccgcacttaaaatcaaatcccgcttcatctttccaaggtaagcggccttttcttcttggattttttgcttatgcgcctcatcaaacaaaatcgcgccatagccaatagcctcaactcgttgaattaaattttccgccgtcaagtttccatcaaactgaacggttgccttttccgttgccagattcacattcgcctctagcacaccttctgttgctttcagctccttctctactcgagcagaacaattggcacaggtcatgccagtgatggcaaatgtttctactgtcgtgtctgccaattagatcacctcagtttcatacccagcttcagtcactgctgcagcaatttggtctgcggaaacttgcgcttcatcgaatttaacaacgccttgattcttctttaaattgattttgaccttatcgatcccatctaattgattgatcgccttttccacgttcgctacgcagtgattacagctcattccgttgattgcaaattgttttttcataataatgatctcccattcctatttttttatggctgtcgccaattatttatgatgattgcattcacactgaccgggaatacaattgcattcgatcgtggctacagttttcttattaattaactgcgctttgatcatttccacatctgcatctgtcagttccgcttccgcaactaactccgcgattgtttcgccgattcgtttcgcacaaatatgagaaaacaaattttccgtcgcacttttgaccgtttcgccttcactgattgccggataataaatgtattttttcccagcttgctctgtccgaactgcttctttttttactaatcgacccagcaatgttttgatcgtcgctggtttccaatccatggtttgtcctaaaatatcaataatttcttgcgctgtagtagattcctgcgtccaaattacccgcatgacttcccactccgagtcactgattttgatcggtgtcaccgtcattgtcattactcttcgcctccttcgtttacatttgtaatctacaaacacagtttacatttgtaatctgttttagtcaactgataagcgaaatttttttaactacctccaacatacacactactcattcatattacgaaaagggaaactggcagctaactcattcaattaggaaattcatttttctaaaatcaggaaaaatgagctttttttcgttcgcataccatcatgctaaactggacgtataaaaatttctttttccgtattaaacgatcctctttccataaaaactgcgaaaagcatgactggcagctaactcattcaattaagaaattcatttttccaaaaccaagaaaaatgagctttttttcgttcgcataccatcatgctaaactggacgtataaaaatttctttttccgtattaaacgattctctttccataaaaactgcgaaaagcatgactggcagctaactcattcaattaagaaattcatttttccaaaaccaagaaaaatgagctttttttcgttcgcataccatcatgctaaactggacgtataaaaatttctttttccgtgttaaacgattctctttccataaaaactgcgaaaagcatgactggcaaaaaggctctgcaactagaaatagtcgcaaagccttttcttctatataatcttatttcactcgcaaacaacgcatcgcattcaacactgcgatcactgtcacaccaacatcagcaaatacagcggcgtacatcgttgcaaatcctagagcacctagcaatagaacgatgaccttcactccgatcgcaaaaacgatattttgtttcacaatgcccatcgtcttgcgagcaatttggattgcaaccggaattttagctggctgatcatccatgatcacgacatccgctgcttcgatcgctgcatccgaaccaagtccccccatagcgatcccgatatctgctcgagctaatacaggcgcgtcattcattccatcaccgacaaaggcggtcttttgctcatcagacaattctgcttccaaatgattgaccttatcttccggcaacaattcactgtagacctgatcaatcccgaccttcttgccaatcgcatctgcgatcatccggttatcacctgtcagcatcaccgtccgtttcacacctaagcttttcacttctgataaggcttctgagacattgtccttcagttcatccgcgatcaatagatgaccaatgtattttccgtccattgccacataaacgatcgtgccgatttcattaactgcttggaagggaatatcgtatttcgctaacagcttttcattcccgactaagaaatgatgcccttcaatctcaacggaaatcccaaagccggcaatttcttccaatttactaactggtgataacggttggtccacgtacttcacaattgattgtgcaattggatgactggagctttgttcagcgctggcaacatagcgtaagaaatccttttgattgatcgttgtttccaccttttgaacttcgaaaacgcctttagtcaaggttccggttttatcaaagaccagcgtttccacattcgccaacgtttcaatgtagttacttcctttaatcaagatcccagctttactagcgccaccgattccgccaaagaagctcaacggtacggagatcaccaaagcacaagggcaagaaataactaagaaagtcaacgctcgatacacccaaccataaaaaggttcacccataactaacggcggcacaattgctaacaacacagccagaccaacaacgatcggtgtgtagtagcgggcaaaactggtaataaagttttccgccggcgcctttttactgctggcattttcaactaagtctaaaatcttgctgacggtcgattcaccaaaagtcgtcgtgacctccaccgtcaattgtccgctttgattaatgaatccgctaagtatttgttcacccgcattgatactacgtgggacggattcaccagtcaacgccgaagtatccagcatcgaacgtccttctttgacgatcccatctaatgggaccttctccccaggcttaactaaaatctgatcgccaacacgaattgtttccggcgcaacctttcttacttcgccattttggattaagttcgccgaatcaggacgtatcgccaatagggaactgatggattttcttgattttgccacagcataatcttggaaaaattctccgacttggtaaaacaacatcactgccacagcctcaggatattcaccgatcgcaatcgcaccaatcgttgccacagccatcaagaaattttcgtcgaagatttcaccatgaaaaatatttgttatcgcagtcttcaaaacatcgtaaccaatccataaatataaaatcagataagcgatgaactcccaaggcattgttggtttaacaataactaacacgcctaacgctaaaattgccatacaaatttgaatgattttccctttagaactctcttcgactttttctgtttgcacgctattcacttcaacatctggctctaatttgttcacgacctctttagcttcctcgcaaacccgcgcgatttccttttcaggcgcttgaatcgttagcttcgtgctcataaaatcaacctgcgcattttctacccctttaatttgttggacggaacgctcgatttttgctgcacagttagcacaatccaacccatccaaacgatatactttttccatgagatacccttctctctaaaattacatatgaatgtttcttcatgtatattatatatgagcgactattcatgtgtcaagcggaaaagaaagctttttcaaaaataatttaacagtataaaccctgatatgaaagtatttctattaaataaggaactttttttaaaaaaagtggttgacttctagacccgcggtcggtattattaagtcagaagcaacgaccgacagtcggtttaaagaaaggaggtaagacatgcgcatcgtaaaagagcatgatgaacgaagaaatgagatcatcatcaccgccgaagaattcttcttaaccaaaggattcaacaaaacaaccgtcaatgacattctgaaacgaatcggcatcgcgaaagggaccttctatcattacttcgtttcaaaagaagaagtcttagatgccgtcattggtcaaatcattgatcaagaaatttcaagagcgaaagaaatccaagcttcaaatggatcagcactagaaaagctcatcaccttccttgcacaaaatagtcaggaagatgaacgaaaagaagaaatcgtcgacaaattccaaatgccggagaattccttaatgaaacagcgagcgctagccggtaccatcaatcaagtttgtcccgtcttagcagaaatgattgaagttggcagacagcaaggagaattcaacacagcttatccgctggagagtatccaattcttaatcgccgggattcaaacgatgtttgacgaaattgaaaaattaccacctgaaatcattcaaaaccgaatcattgctgcaacagatttaatttacaaaaccttggatgtgaacccagaaatccatccttacgatcaaactaccgaacaattacaaaaaatctttatcccataagctcaacaaaacctgttgagtttaacatttaaaactaaagtgaccgacagtcggtcaagaaagaggaatttactatgaacaatacagaaatgatggaaacactagctatccaaacaaacgaagacgctatgacaatcgaaagcattttaaaaagctacgaacactattgcaacgaaaatattactcggtactccagcaaacacttagctgcaatcatcgactttatcactgctgaaactcatttgccagaagaaacctgctcaaaagtaatgacccagttctttgacacagtgaaaaaacaaattaaacataaattcttttaacctaaaaaaatgaaaagaggaaaataaaatgaaaaaacttactatcatcgcagtggcactcattactctaggtgcgacttcgcaaatcgtcgaaaagaacatcgacaaagaagaagtgaaaactgttgttactacgaatctcaaagaaaatgcttccgagaatgaatcaatctacttccaacatgaagatgacaaacaaggatcattaatagaaaaaattggattttaaaaaagcgtcgaggctatcctcgacgcttttgctctatttcaattatggataaatacggttcaacagacgtgggaatggaatagcctcacgcacatgatcgatcccagcaataaaggtaatcgttcgttcaaggcctaaaccaaaacctgagtgtggaacagtaccatatctgcgtaaatctaaataccatgagtattcttcttcactaagattatgctcacggatttgttctaacaagaaatcataatccgttgcacgttctgaaccgccgataatttcaccatagccttcaggcgcaatcaagtccgcacagatgacaacatcttcccgagttggatgtggtttcatgtagaatggtttgatcgcctttggataatttaaaatgaagactgggcggtcaaaggagttcgcgataaaggtttcatgcggcgaaccgaaatcatcgccccattcgatatcatcaaaaccatttttcttcaataattctacggcatcatcataagagattcgcggataaggaagttttgtatagttcttcaaaatttctttgtcacggcccagtacatctaacgcgtaatcgcaattatccaatacgttttgaactaagtaagcaacgtactgttcttgaacctctaggctatcctcttggtgcatgaaggccatttctggttcaatcatccaaaactcaattaagtgacggcgtgtttttgatttttctgcacggaaagttggaccaaatgaaaatacttttcctagtgccattgcggctgcttccatatacaattgtccactttgagataaataagccttatggtcaaaatagttcgtttcaaataagtcgctggtgccttcaggagctgaacctgtcaaaatcggcggatcaactttcacgaagccgttgttgttaaagaattcataggtcgcacgaatcacttcgttacgaattagcatgatcgcgtgctgttgtgacgaacgcaaccataagtgacgatgatccatcaagaaatcaacaccgtgttcttttggtgtaatgggatagtcatggctttcaccgatcacttcgatctctttcacacctagttcatacccgaattttgaacgagtatcttcccgaatttctccagtcacaatgattgatgtttcttgcgtcaattctttggctaaatgaaagacctcttctgacacttcactttttacaacaactgcttggaaataagccgttccatcacgcaattgtaaaaaagagatttttccgcttgaacgcttattagcgacccaagcaccgatttttactgtttcgccaacatgattcttggcatcaatgatttgaatttgttccacaaatgtctctcctaacttatttatcccgaattgatgttttactttttactattttcaataaagcggcgaatccgtacaacggcttcttctaagtcctccatgctggctgaataactcatccgtacactatcatcagatccaaatccttcaccagttaccagcgctacttgttcttgctccaacagatcgttaacccaagtcgttacattgtcatagccgcccatctccatggctcccttgatatttggaaatagataaaatgccccttgcggttttttcagcttaaagcctggtaaatcagccaccttcggatagatcgtatttaagcgcgcttcaaaggcttgccgcattttttctgccgtttcttgttcgccagttaaagcttcaacagccgctacctggctgacggaggttggattacttgtcgcttgagaggcgattgacgtcattccgccaatgatctcagcattcccaatcgcataaccgattcgccaaccggtcatagaataggtttttgataccccgttgatgatcactgtatgatggaaaatctcgtcagataatgaagccatatgcggcgcttcgttcccattataaacaagatgatcataaatatcatctgagacaatcagcagttcatgacggacggcccattcgccaatttcccgcagctcatcttctgtgtagatcattcctgtaggatttgacggcgaattaataataatcgcttttgtcttctcagtccgagctgcttcaagttgatcaacggttatcttataatcattgtcctgagcaccagtaacaaaaatcggcattccctgtgccaatttaacctgctctccgtaactcacccaataaggcactgggataatcacttcatcgcctgcgtccaaaatcgtttggaacaatgtgtacaacgcaaattttgcgccgctggttacgatgatgttcttcggctcaatagttagatcgtaattcttcttcgtaaagtccacaattgccgtctttaattctggtgtaccgccggaagcagtatagaaactaaccattccgctcttgattccttcaatcgcagcttgctcgatattctccggagtcgtaaaatccggttctccgacagttagactaataacatctaagccttgagccttcaactctttggctttagctgtagcggctaaagtgacggacggttctaggtttgttacacgctgtgacaatttcataactgataactcccttaccaagattttttaaatttttttgatctctttgatcgtcttgccgtcattaaatgccagcaagtaataataaatcgcgccctgttcatctttcgcagtaatctcccaagcagtctggtcgcgatagattcccagatcagccttttcaaagattagctctgggtgatcactttcaaaacgtttttcagcttgctgctctgtcagaccatccttttgattaagaacgcggattttttcccccgattctggaacgatcacaataatcgcttctccagagttgctttcaccagtgacggtgaaatacgttttgtcacggttaaaccaatagaattgatctaccgtttttaaatcggcatatttctctgccatttgaacagcctctcttttggcttgctgcatcggacgatttgaacgaataaaaatcatggtcgctaccacaatgataatcagtaaaaatgccacgattcctaaaagccatcggttgagccgttgttgtcctgcactattcgtatccaaaatcatactcctctcagacaagctacattataccaaaagaagagcttcgcctcattaattctctgtacttttgtcagaatttaaaaattggtcggtctcaagtaagatttcttccaacggtagctgtttgatcggcaattcttttggcaaagctttgcgtaatttttccccatagccagcagtgataaagcgttgatctaataacagcatcacacccttatccttttctgagcgaatcaagcgtcccaatgcttgccgcaatcgcaatgcagcatgaggaaccgcttcttggaaaaagggattgattccttctgctgctaaaaaatcattgcgcgcttttacttgaagccgctgcggattttcaaatggtagacgtgttacgattaaaatctgcaaaatatctcctggtaaatctatcccttcccaaaaactatccgcaccgaacagcaacgcgtctttagacaataagaaccgcttcagcagtttttcacgactgccgccgataccttgagctaatacttctctgccttcgtttagtaaagggacacgcacacgctgataaacacgattcaagatatcgtgtgaagtaaacagaaccaagatcggccgtttttgattttctgccatcttatgtacgacactcgctacgtaattcgcgtactgatcaggcgaggtcgactggatactgatactattagtcggcaaatacaaacgcgcttgttcggcataatcatagggactgctaatgattttcaatgcggcatctggaattccccagcgcttcgcaaaataatgacgatcactgccgatttttagcgtaccgcctaaataaagaatctgttgatagcgatcataccattttgtctggctgatcaatgaagcatctaaatcctgtacttgaaaggttttacgtttcgcattaaaccaatgaatatagcgagcgtcccatttttcgttaaaggtctcaaacgcctgctgttgctgagccaaattctctaacaataattggaggtcactccactccgcctgttccttgataccaaatgtctctttgtacatcgtaaaatacgcctgcaactgatcccctagcgtcaaggcgtcctgataaagacgaccgatacgctgtaaaacttgttcgccagctagagaaagctgatcgatcatatctttagtaatcaaccgctcattttctgttgggtattcgtccttgaaaatttgataaaaatcagtcaaatcctcattcaattcctgcaatacatcttgaaaaatttcaagtagatgctgcgtctgttgatccttttgtacgagtgcttgccaaacagaaaattgctgattatcgaacaaatgagtgatcatgcgttgaattgctagaagattaaaatgctggctagtaactttttccaacacccgattcaaatgatgtgcctcatcaatgatcaaataaggactcttcggcagctgtggctctttgcgctgatcctcttgggctaagtaagcgtgatttgtcacaattaaattactttgagtcaattttttctgacggtgacgaataaaatcaaccgcataaaaagggctattagggttcaatgtatgcgttcctaaatgagctacttcttgccaaaaaggatgctttaaactggtcatattcagttcatcaaaatccccggtctcggtttgggtgagccaaacgagcaaagccatttgataaaaagtatattgcttttgctcagatttcttttcaaagctttgatagaagcgttctaaatcaatataatgtcgactgcttttcatcaccaccgcctgcaaaggctgatccaataaacgattgaacagtggcagatcatgattcaaaatctgttcctgcagcaataaagacaccgtactaacaactatcggcttttctggtgttgctaaaaaactcataggcaacaagtagcctagtgtcttgccgattcctgttgcggcttccaccaaaacatttttgtcatcctttttattaaagaaatcatacaccaggttcatcaaacgagcctgttcttttcgaaaatccaattcaccttgatagaccttctccttcgcctttcgcgaacgcggataagccttcgtaccaaaataattctctgaaaagagcggcacctgtttctttcgcaaagccaaaccatgaataatggctaaatcttttgataatggtttaggattggcctgcatctctcttaagcaattttccaagtaattctttgtttgaaaagccatctgatcagcagtatcaactattttttctaaggtaatgattggcagctcttttattttcgcttctaagtgcagcaataattgcgctgtcacatctgcatcgctatcagcctgatgcgggttttcatgaaccaaatgcagttcttctgccaaatcctttaagcgaaagctcaaagtggtaggcatgaatacttgcgctaattctacagtatcaataccaggaatcgtcagcggcggcatcccacagcgttctaattcattacttaaaaagggatagtcaaaatgaatattgtgagctacaaagatcgtatccgctaataagttcgtaatcgtttgcgccacgtcttcaaaatagggggcccttttgattcgctgattcgtgattccagtcaacgtttggatctgcgctgggatcggttgatccggattgatatcagtcgaaaaatgcgtgacaatcttcccatcttcaattaatacacaaccgaattgaatgattcgatccgttttagggtctgttccagtcgtttcaatatcaacaacggcataattttttttcacctgcgcccctcctttctcagattcgtaataattagaagaactatacgtgatcgacgaagatttatgctccgtttgttattagcttacctcacgcattatatctgaatagtaccactttctacaagaaagttctttgtttaaaacgattcgactttctttcgtactcacaaataagtccttccttttcaaaatctaaagtaaaaaatcacaaaaaaagccagatgcttacgcatctggcataaaagtctactataattaagctttgttaacgtttgtagcttgaggtccacgttggccttcttcaacgtcgaaagtcactgcttgaccttcttctaaagttttgaagccgtcgccttggatagctgagaaatgaacgaatacgtcgtttccgttttcagcagtgataaatccgtagcctttttctgagttgaaccattttactgtaccttgttccatgttaaacatcctcctaggataaaaaattgatttgtaattacttgaatggtgaaataggaaagatgttgtctgaaacaaacttgccaatattaccgtacaaaaactacaattagaagtataacatagataaagcgataacactaggttatcgctcaaaaaactttttcttaatatatttgaaatatttcgtttctaataccgcaggatcgccaataagcttttctcatccggtgcatccttttggtctagaacaaagacctgtccaccatttttgataacattgtcggcaatttcgttcaatacttgtcgacgatcatattctacgtcgggatcttcgccaaacccatctacaagatttgcggtcgcaataaataaatgggagacttttccttctttcgctgctggaacgatatcaatcaattgatcaataaattttctattaatcaatttttgataggtttgtgtttccacttctgctagctgatccgctattttttgtgcttcttgtttaatatcattgatattcatctgagcaggagatccactgatcgctgctttatctgagtaataaggatttttagcaatttttttgaattgcgcttgattttctggcaaagcaaaaagatacactggcaattgatccggattctctaattccttcagaaaattatcgacagcttggtaataattcacccaatcaatttcaacttcttcatccttcgtactgactccatgaatactaccggcctcaccgcctcttgtagaaacacttagatttcctccagtcagctcgtcacctaaagcagtcacgatatcctttggtgcatcttctggaagctcgatcagctcgacttctttattgcgtacaaaataaagtttcatagaatctctatttaaagccattaaataataagcatagttgaattgtgcattcttaatgattgccaaaagatacggcagatcacttacatagtattgatcatcaactgcaatacttaaacgatgaacatacatctcttttgcagttaggattactgcgacactttttgttccgctgcgccaaaaatctccatctgctagtaattgatcgattttttcttggaatggttcaaagctgtgatcagtgtacttcttctcaaagcgtcgcttcgcttctttagcaaagtttttaaacatgatttgatctttttcaacatcttgatgcgcatgatgagtattcaacataaatgtgataaaaggaccggttgcttcttctgaagtcaattcagttagtaactttttactgatatttgccataaatgtaccctcctatttaatcttccaacccaagtgtaacatagctctcaatttccttaaaacgaaatgcaacccttacattatgaaataatcctaaaaattttactgtaatttgcataagtcttttctaatacatttcttagtgattaacaaacagtcgttcatgatttcattgattgaatgctttatcatgaatttataccaattatcccgaattggtttttcatacttactcctaccaagagtaaataacaaccttcatttccaccatagtgacggctatggtggtttttgtcattccaacttttcgcagttcctcaaagtcagactgacaaatttcattctcaaattagatattgatacgaggcgggtagttggatgatatgcgtgatgagaatcaaattaactttttttcggtttttgaaaaaagttagtacgctaaaacgaattagctgcctgccagttgcctcttccaatacgttagtggaatcgtatgcgtgacgcctatccatttccctcaacaaaaatttgtttgcgtttccaaattttgctaaactaaaactaacaaaacaagggggtggaccatgaaaactgccgaggaaatgtaccaattctgtcaagataccgggtttttctctggttcagatcgtcaatggggtgtcagacttttttctgtcttagaaaagcagctaaggacggatgaagaggtactgatttgcttcattggactgcacaatcgaacatctgctacaaagaatgatggattttatgcctacgccttgactgatcaacgttttatactaggacaaaaaaagttgatcggtgatgatttcaaagtcattcctttgacaaatctccaagaccttcgactaaccaaagtaaccagcttagatatattggaaattgcttctttagaaggaacaattaaaattgtcctaacagaagaagaagctccaaaagtactgacacaattaaaggaaaatataccactcgtcactaaagaaaaaaactctgaaaagcaattaagcaaagcagaacaacttttaaagatgaaggaattactggatcaaggaatcttaacagaagcagaattcgcaaaaataaaagaagacattcttaattaaaaacacctatctaagaaggaaacaatttcttagataggcgcttttttattggatcgctgctttacctgtttcacgcgtacgaatgcgtatcgcttcttcaatcggataaacaaatatttttcccgttccgcattcctccgattgacacgtttctaagatcaaatcaaccactcgctcgacatcttcatccgctaagataaaactcaccgacactttaggtaataacgtagtgataacttcttgtccgcgaacatggcttttttgccccttttgaagtccacagcctaatacttgactgactgtcatcccgttcacttctatttcttgatcaatcgctgctttgatcatctctaatttttcttgtctaataatcgcttcaacttttttcattgcgtcctcctcaggctatttttaagaatccattcccataaatgtcggataagcattttcatcatgctcgattttatccaaccctagggcttcttcctgttgtgatactcgaataggcatgaaggctctaattaatgaaataatcaaatagcttgctgctccagcaaataccagcgtaaacagcacactttcaatttgagcgataaataaatgagtttcaccataaattagcccaacttttccaccaactgaaggatcagcgaaaattcctgttacaattccgccaaaaattccgccaacaccatgacaaccgaacgcatccaaagcatcatcaaacccaagcttttgcttgatgactgaaatgaagaagaaacaaaatggacttactaaagcaccaattaacagactagaccaaattgatacaaagccagccccaggtgtaatagcgaccaatcctaccacagcacctgtacatgccccaacaacagttggtttaccatttaaaattttctcaatcaacatccaagatagcatcgcacaggcggccgctgtattcgtcgtaatcattgcatgaattgccaaaccatcagcagctaatgctgagccgccattaaatccaaaccagccaaaccataaaagccctgttcccaaaacaacaaaaggaacattgtgtggtcgataatcaccaagatggtactcgcgacgacgacctaatacgattgctaaaaccagccctgaaattcctgaactaatatgcacgacatttcctccggcaaagtcaattgagccgatcttatcaaggaagcctccgccccaaaccatgtgtgccattggaaagtaaaccacgaccaaccaaatcgcgataaatagaaaaatcgcagaaaatcgcatccgaccagcaactgatcctgttaaaatcgctgttgtaatcaaggcaaacatcatttgaaagaaagcaaacaatccttcgggaattccatcacctttagtcatagagaccccattgaaaagtactttatccaaatttccgataaaatctccatcaccactaaatgatagcgagtagccaatcactatccaaatcaaggatgctagtcccattgtacaaatgaccatcatcattgtgttcaaaatattttttcgtcgttctagcccaccatagaaaaatgctaatgcgggagtcatgagaaaaactaatcctgaacaaatcaaaataaatgcaatattcgctgccatcaaaccactccatttctttttatgttaagtattctaacatcaatcttaaataaaaaaagagtttttactcatttttttcatttttttctaatttaatcactttccatgtcagaaaacttcacataaaaagagcagggataaatccctgctcttataattcgtggtactctctgtaaacatcttgtttcttcaatccatgtcgtttggctaccgatttaattgcttctttagctagctgtccttcttcaactaatgcttcaacctgctctttcaacgttccttggaatacttcctcttccaatacctccgttgtgccagaaactaacaagcagcactccccttttaaagaatgctctgatagataatccatcaattctgttaccgtcccccgcagatattcctcatatagtttggttaattcccgacaaatcaccacatcacggtttccaagaatttcagaaatatttttgagtgtttcttttacacgatgaggcgactcatagaaaatcaatgttgctgtctgatttttcaactcttctaattctttcttctgagcgcttttctttcgttgtaaaaagccataaaaataaaagggttgaggcaataatccagaagcaatcaaagctgtcattccggcagtggctccaggcaaggcaaccactggaatatcctcttctatgcaagctaccactaattcatgtcccggatcactaattgaaggcatcccagcatcactgacctgagcaatcgatcggcctttttttaggaaatccaataactcagggattctttcgttatagttatgttcatgtaggctcttttgtggaatcttcacatcaaagtgattcagcagcttctgggtattccgtgtatcctcactggcgattaaatcaacggtttgcaatgtcttgactgcacgaaaagtcatatcctccaaattaccgatcggtgtcggtactaaatacaatgtgccaacttcctgtgagaaacttttctggatcttcacgatcattctcctaactcattttcattttttatctgttaaaaattactatttctaattctttctcgtaaatccaatcaaaaatttgaaaaactagcgttatcttcgtgtacagatcaatgcaacgatagactaaatccaaaactgattaaaaaagtgggtgtgacgaacagcgtcatacccactatttctaattcattttatttttgtttgctttcacgataaataacatctaaacaaaaagcacagggctcatctgcttcacgccttgatccataaagcaagttacatacgtgaaagccatcttcataaattttttcaagattcaaacgagattctgacaattcttgtcgctcatccaagactggggacttcttctcatcaatctcacgaatccgctcccgcaatcgttcattttccatctctaatttagcatttttttcaacgagctccagtaaagtctctttcatcgagactaaatcttcgagattcttttgcatgtcaagctctaattgattcaagccatcatacaaggaacgtcgatccatcatgacagatcacctgcttcaactagttcttgataatcaaaatcaatcgtcgcatcacggccaaacaaacgaactttaacaactttactaagtaaattcaggccgattacttttccccgaccttctggtgtattaatttccttaccataatcaggcatttcttttttcgcagcttcatattcaccgttttcatattttaaacaacacattaaacgaccgcaaagtccagaaattttcgttggattcaacgataatccttgatctttagccatcttgatcgaaaccggaataaaatcacctaagaaggtcgaacaacataatggacgcccgcatggtccgattccaccaagtatttttgcttcatcacgaacaccaatctgccttaactcaattcgtgtacggaaaacgcctgctagatcttttaccagctcgcgaaaatcaatccgtccgtctgcggtaaaataaaaaatcattttactgcgatcaaaagtatattctactcggatcaatttcatttccaattcatgagcgcggattttttccttggcagttttgaaggccgcctccgcatccgcttcgttttgagctactttttttaattccttgtctgatgctttatgtaaaattgtttttaaatcatcggacaaatcttttttttcaatctctatttttggaattgccactgtcgcaatctggtgcgcctgctgtgactcgaccaagactttatcattataaaaatattcgttttttcctggcgcgtaatagtaaatatgccctgcgtctcgaaaacgaacacccacaacttcaaccatggttctccctactctcttaaataacgttaagcataaacgatgtgcaacgttacttgttctgcgatattttgaaatgatacgtttgcttctagtttctgactggcggataaaacatcttccaataggtaattgtatttttctacacctatttgattttgtctcatcacttgatcacgtttttccttcacaaaatacgccaacatctcaaaggcgagctgttgctgtgctttgtccttaaacgtcctgaccatttttttctgaacatagataaacgcttgcggatcatttttttcgagataattaaaccattgaataacaacatctctagcttcattaaaccattcatcttttgagatttcaacagcttttgtataactatttgttaaatttgctaagagttttgcagttttttcaggaatttgttctgcctctaaacgagactgcaagcgttctgtggacaacgcttggaagtggatgatctgacaacgagagcgaatcgtaggtaaaatttttcctagcgattgggtctctagaataatcataaagttagctggtggttcttccaaaaactttagtaggctgttagccgagttcatattcattttttccgcttggtgaataatcacgacttttttcgcagattcaaagccgcttttggttaactcactttgcagtgctcttatttgatcaactttgatggattgtccatcaggttcgatttcaactacatcgggatgatctttactggttatcctcagacaattgttacatgtttcgcaaggcatttcctcttgcaaatttaaacagaactgatgcttggcaaaccataatgccaattctgctttgcctgttccttggtcgccttcaaaaagataagcatgggccaaacgcccatgctcaaaactgttttgtaattgacgaaaaacaatgggctgaattgtctggagttttttcgcttcttccatcttaatactggtggaagccttcgactggcaagacaaatactgtcgcaccgccgacttcaacttcaactggataagggacttgtccatccaacgaaatgtctaaagttactggtgttgtaacgtattgcgtccgcgcttggcatgtttctttgattaaagccaaagcatcttccactcgttcgtcttcgatcccaataataaaggtactgttaccagcttttaagaagcctccagtagaagaaagtttagttgctcgaatgttcgcatcaataaattcattggccaaacgatttgagtctttgtcttgaacgatcgctaaaataagtttcatagtttacacctctcatgattggaaatagtctggataacgtgtcaacaattcgtaaaaacaagctctcacgacttcgtctaaacgcttccgagcatcgatttttatgatccgatctggattttcttctgctaattttagataagcatgtcggaccctctgatgaaattgtaacccttccgagtccaaacggtcaatttgattggttcggttcttcatgattcgttgcaagccagtatcggaatcaacatccagatacagcgtaatgtcaggagtcgtcccttcaatcgcaaattcattaatcttagcaacttcttctataccaataccacgaccggcaccctgataagctaatgagctatcaacaaaacgatcacacaagacaattttatcttcatcaagtgcaggccagaccttttcaatcagatgctgacggcgtgctgcggcataaagcaaagcctccgttcgatcatccattcgatcattgctagggtcaaggatcacgtgacgaattttttctgcgatcggaatgcctccaggttctcttgttttgacgatagatcgtttcgccgttaattgtaatctaggatagagctcattcaaaacactggttttcccagcaccatctggcccctcaatcgtaataaataatccgttcacgttcttgtcccccaaaataattttgatcttctctctctaaaaaaacaccgcgaaatttttataattcacggcgtccttccactgcttttaacaaagtgatttcgtcagcatattcgatgtcgctgccaacggataatccgtgagcaagtcgagtaaccttgatacctgctggtttgatcagacgcgatagatacatcgcagttgcttcgccttctgtcgttgcatttgttgcgatgataacttcctttacctcatcgtcatgtagacgtttgattaaaggtgcgatattgatgtcttcaggacctgtaccttccatcggtgacaaaacaccgtgaaggacatgataaagaccgtgatattcacgaaccttttccattgacatcacatcttttggttcttccacaactagaatcgtgccacgatcacgagttgtatccgaacaaatctcgcaaggatcttcttccgtgatattcccacaaacactgcaaaaacgcaaatcccttttaacactgatcaacgagcgtgcaaattcatttaccgattcgtctttcatatcaattgtaaaaaaggctaaacgtgtcgctgttttttgaccgattcccggcagcttcatatagctttcaatcaactttgcaattggttctggatattgcattctgtccttcctctcttccagaaaggcttcacgaactcgttcagcttttgagctccaagtaggtacttgttccacatcagctctgcaagcagtcactgtatgcgtagcttgcgtagaaaagctagttcgttaagccggacatggataatactactagcaaaaacaatatatctttgaaaaagtaatattttttgctgagatcaaagtcgcttacattccaggaagtccctttgtatatttccccatcgtttgatcggtttcttttgtaatcttagtaatcgcatcattaactgctaaaacaatcatgtcttgtaacatatcaggatcttctggatcaattaattccggattaattgtcattgctttcatatttttatccccagtaaatgtcactgtgactaaatcgttggttgaacttccagtgaattctttcgcattcagttcatcctgagcctttaccatttctttttgcattttttgcatttgtttcatcatgccttgcatgtttcccattccgcgcatcattgtatctattcgctcctttaattaataaatttatttcataaaactacttaccaattgccttaaagcttaaagtatgaagaaaacctaatacactttaatcatctttaattgttacaagatcgccaaacagactctttgcttgctcaacaacttcattcgtttcctcaggtattaaagtaatttcatcatctgtctcattcgtttcagctgctactgggcgatcatgatgctgactgacaaaagcttgtcgtaatcgtggccagctttcacgagtaataaagacaaattctggcgtgtaccccttgatcatcatactcaaagtgttttgcatattcaagcgaagctcatcgctgctatcagctcgttgacagacaatctcataatcaaatgcgattaacatcagatcaggtcctgccgccattggttcgctagccttcaacatcgcccgttgtgtgactggcaaagccattaacaggtcttcccaaacattcttcacacttagtaaatgatctttagttgcctcacttaacacttgatacacacgttctgtcggaacacgataggtgcttgcagttttcttcggtgccgttttgcgctcttctttttcaaccgttggctgtttttttaattgttgaacttctttttgaagctgctgtatttgagtcttcaaggcagtgaattctgcttgatctgctggttgtgtcgcagatgctactgctatttggttgcttgaagaatcaccaattgcaatattagcagacgtttgcggtgtcgccaatttcaccgtcgctacttctaaataaacattggcatgattggtaaatcgaatctcgttttgtgtctcgctcaaaattttaatcatgacatacaaacggtcagaaggtgtagaacccgctaattgtttaaacgtttcagttaaataagcagcacgactttccaataacttgggtgcttgctggtagatcagcaaatcacgacagtacagtaacaaatcttccgttaagcgtcgagcttctttcccctctgctaaaatattttccagaacttctagcgctccactcacatcttgctgcaaacaagcaccgataaaactgtccatcatttctgtagtcaaactgccagtcacggctaacgcatcttctaaggtaattttttcattactgaaggaaatcgcttgatccaaaatacttaacgcatctcgcatcccgccttcagccgctcgtgcgattacggacagcgcctgctcttcataaggctgattgctttgttcaagaatataagccatccgtccaataattgcttgaacatcaatgcgtttaaaatcaaatcgttgtgttcgtgaaatgatcgtagctggaatcttatgcggctcagttgttgctaagacgaagatcacatgttccttcggttcttctaacgtttttaataaggcattgaaggcacccgtagaaagcatatggacttcatcgataatgtagactttatatttcgctgtcgtcggcgcgtagttcgctcgatcgcgaataaaacggatttcttccacaccgttgttgctggccgcatcaatctcaatcacgtcttcttgtcgtccgtctgtaattgaacgacacatctcacactcgttgcaaggttccccatccacactattcggacaattgatggctttggcaaaaattttcgccgcactagttttccctgttccgcggggaccggtaaataaataggcatgggaagttttctgttgttggattgcatttttcagcgttttggtaatcgcttcctgtccaacaaggtcatcaaaccgttgcgaccgccaaacgcggtaaagtgcttgatacgccataattctcctcttttctttcaaaatcactgctttttattatacgtgatttcgagtaaaaaaactatagaaaccaattgtctaatgcaattgtttagtgtcttttaatttgtcggttggcttcctttctatttagaaaaagccctgtggtataatagaaaaaacgtttttatggagggatattcatgggactatttaaagcagcaactagcagtattggcggtggtttagccgatcaatggctggaaattatcgaaccagccgatatgggacaaacaacagttatgtcaaaaggcgtggccgttcgaaaggatgataaacgcggaagcaataaaaaaggaaccagcgatgtaatcacagatggttctgtgattcatgtctatccaaatatgatgatgctcttagtagacggtggtaagattattgattataccgccgaagaaggctactacaccgttgaaaacaattctgctccatccatgtttaatggttcattaaaagatgcggtcgctgaaacattcagtcgcttcaagtttggcggtgtgaccccacagaaacagcaagtcttttatattaacttgcaagaaattaaaggaatcaaattcgggaccagtactccgttgaattattttgataatttctacaatgcagagctattcttgcgggcgcacggaacctactccatcaaagtaactgatccaattcttttcttcgcaaatgcgatcccaagaaatatggatcaggttgatattagcgatatcaatgaacaatatttgcaagaatttctaacaggcttacaagctgcaattaatcaaatgtctgccgatggacaacgaatctcatatgttccatcaaaaagcttggaacttagcaaatacttatctgatgcattagatgacagctggaaagaattgcgaggaatggaaattgtttcagtggcagttgccagcatctcttataccgatgactcaacgaaattaatcaacatgcgaaatgaaggtgccatgttaggtgatcctaacgtgcgtgaaggctacgtccaaggctcagttgctcgtggcatggaagctgctggtaaaaatgatgcaggcgctgctactggtttcttcggaatgggtatgggaatgaacgctggcggagactatctcaaccaagcttcgcaaaataataatcaacaaatgcaacagaatcaacaggctcaacaaaaaaacacaggtgatcaatggacttgcccgaaatgcggcgaaaaaaattctggtaaattctgcagcaactgcggagaaccaaagccagctccagcagccgcagcaaaaatccaaatgaagtgcagcgactgcggtgaaacagttgatttaagcaatggcgttccgaaattctgtccgcattgcggtaagcccttcaaaggtgttccgatcgactaaactattactaaccataggaggacctgcaaatggcagatgtattgacgcatcattgtcccaactgtggcggacctttgacatttaatccaagtgatcaaaaattccattgtgattattgtttaagtatttttacagtggaggatatcgaaaaatttgaagctaaagaagctgccccagctgaggatggagtaacagaaactactaccgttaaggaagaaagtactgatgatgtcgatctctttctatgtcccagctgtggtgctcaaattgtcactgatcacactaccgccgcaacctactgttacttttgtcataatcctgtcgtattgtcaggacgtttgacaggagaatttttaccgaataaagttttaccttttaaaatcgaccgcgaaaaagccaccgcagattttttagcatggacacaaaagaaacgctttattccaaaagattttttcaacaaagaacaaatcgaaaaaatgactggtgtttattttccctattgggtagttgacgctgagactgctggtaatttgacgggcaaagggacctctttgcgggtctggatcgtcggtgaaattgaatacactgaaacaaaagtctatcagattttccgaaaaggcaaagcgaagattcgtcatttaaccaagaatgcccttcaaaaaaatctgcagcaaaaaatggtcgaaggagtacagcctttcccgattgatcaagccgtggacttccatactgagtacttatcaggcttccaagcagaaaagcgggatattgaaatcaaggacttagctgatcagattgaacatgaattaaccgagtacacagaagacttgttacgagatacggtttcgggatataccacctttacagccggcaataaatccgtaaatgtagagaaacaggacaatcactatatgttactccctgtctggcttgtgacgtatcaagatgcttcgaagaaaacctattattatgcgatgaatggccaaacaggtaaagtcagcggaattctgccgatcagtaataaacgtttaggattgttctcagctgggattttcgctgcgattatgataattgctgtgattgtggggtatttcctatgaaaaaaatcctattattgattggctttttagcattcttgagcccgttgaaggtctctgccgcttctaatacggtagatgatcaggcaaatcttctaacaccggaagaacgaaccgaattgtctaatcaagcagatgccattaatcaaaagatcaaaggcgaagtgtttattttaactactgataccaactcagaggaaccacgaaaatttgcggatgatcagctaagagcacgcatcggaaatgatcataatggtgccttgcttttattggatatgaaccaacgcgaaatttatctctcaacttcagggaatctgatcgactacatcaatgataaacggcgtgataagcttttagatgatgtcgagggagcaatgagagacggcgattattatcaagcaagtaaaaatttcttgtttaatgcacaagaattcgttgacgatggcgttcctggtggggcttatcgtattgatgaaaaaaccggaaaaatcacccgttataaatccatcagaccaattgaattcattatcggttttgtcattgcagcagtggcggcaatcgccttttttgtttctgtacgcttgcgttatcaattaaaagctgggacttatcgttacccatatcgtcaaaatgcgcaattagatttgactgaacgtcaagaccaattagtgaattcctttgttaccactcggcggattcctaaaccctctaacaacaatggaggcggcggtggtggcagtaccactcactctagcggtggtggaacctttggcggtggcggacgcagtttttaatcaaataaaataaaaaatgttatcactatacaccagagcctttcaaaactaatgaaaaactctggtgttttcatgtattttcttgaattcaccctatgattttgctaaacttttagggttaatagaaataaaggagcacatcgatgaaaaaaaagagaagtttcccccttgttttggttgccctagtacttttcttccaaagtctcattggaatccccgtccatgcggcagatgagttttcagtcaatgcgaatgcaggatacgccattgatgctgattcaggaaaagtttttttcaaccaagacggcgactctcccaaaggcattgcttctatcactaaaacgatcacggcatacctcgttttagaagcgattaaacagcaaaaaatctcttgggagcaagaagtaccgatctctgaatacgctgaacaattaagtactgttcctgaattgtcaaatgtaacgttggttcgtgatcagaaatatacagtcaaagatctttttgaagccatgatcgttcaatcagccaatgcctgtgcggttgctctagctgaactcattgccggcaatgagcatacctttgtgaatcaaatgcgcgaacagctcacagagtggggcatcaaagacgcgacaatcattaatgcttctggtttgagtaatgtttatctaggcgaacatatctatcctggtaccgaagaaaatgatgagaatctaatgtcggctagagatgtggcaatcgtagcccagcacctgatcaaggatttcccagaaattttggaaatttctaagatcaaggaaaagacattcgctccaaattcaactcaaccaactgaaatggaaaattggaatgttatgttatttgatggtccgaattataaagaaggcgttgatggcttaaaaactggtactactgatttagctggtgcttgttttgtcggtacgatccaaaaagacggacgccgtgttatcacagtcatcttaaatgcactaaatcaaccaaatgatgagaacgcacgatatgtcgaaacaagtaacttgatggattattgtttaaataattggagtcagcaagacgtaactgttgctggacagacacccactgataaaaaagaactaaaagtcacagatggcaagaaaaaaacagttgctttagccatggaaaaacctgttaagctttggattcgaaacgatatggatcctaaaaatttaacgattaagacaaccttagatcattcattgctggacaataatgcaatcattgcaccggtccacaagaatgaaaaaattggtactgtcagtgtcgctttagcccaagatactttgggctatgtccaagaaaacgaaggtgcaaaaacagatctcgtaaccaagagtgccgttgaaaaagccagtacattcgaattgatttggcaaaaaattacaggtatctttgcataaaataaaaaaatttcaagaacatcgacagtttcagactgtagaaaaaagctgttccaagttcatatttcgagcttggaacagcttcttttatctaatttatttcttttcctttgttttaaagggaaaatacaactcgacttccccttctgcgaaatgtggtaaataatgttcatggatcgcaccggcaagcttcagattttccatagggaagatttctcccaacattagatttgtcgcctcttcaattttttccgcactagccttaactgtcaaatagctcattggcggtatttcccaacgaatccatccttcaggtgcttgggctttttccggcacttgaacaccagctaaataacgtccctcattttgccacggctctaaccaatgctccgcatcactcatcagaccccatagctgcaaatccttcatttcttgtcctgccaaaagatcaaccaattcttcaaaatgagtgttcatttgatcccataataatggcacccacgattgcccatcctcagctaaaccatgtccttcttttccgacaacaaaaatagtgggcagatccacgcgatcaatgcctttaatcttcatccatatccctcctagatcattttagtaaattactttttgaaatatactcttattacgaatactatcttacttaatttattcatcctttatactcagttcattaaaaatgaaaagagtaactgtaaaaagcaaaaaccgacatcctccacttaagtttactaatcttcctaaataaaaccaactaatagttcttaactgcgcatttcacccgttctttgttatactgacatataaacaagcataagctaatcatcaaaaaagcttaaaaatatatttcccaaatttcaaaggagtgatgggatggattttcaacgagatttacttgctttagccatctattttattgttttaattagtgtaatgattcgtttcaaacaaaacaaatttagtaattttgcattgtggacaggcatttttcttgtcttatatttttgtgtgattgaaattcaaaagaaaaccttttatattttgatcccgcttttcttctttttattgtttcgctatttttatattaaagagaaatgccgcttacgaaatggctggctactgaatcttgcactaataagttttatgggctacgtagcgcttgtaacccttaccgcaagctctttgattggtatgggtatcttaggactattagcactcttatttttaatgaccatattgtttggtatctacgcggccgtaatcttcttgattggcaatagtttcattgtcttgcgacacgaatcacgcaaactgcctaacttgttgaccttgattctgggtttggcgatcgtagcattgattattttacgaacgatcggtccacgaatacttcctgattggtcagtcattttgctttcgattccgacgacgatcgcgttttatttctttgtcgtcttttggaattttttatcgatctcattgatttatcaactcaataaaccaaaatataatcaggattttgtgattgttttaggtgctggattaatcggtggtaaaaaagtcacgccattattggccaaacggattgatcgtgcaattcaattttaccgcgaacaaagcgaaaaaacattatcaccgccccagcttttaatgtctggtggacaaggacctgatgaaaagattcctgaatcgcaagcaatgagagaatatgctttggagcagggaattccagacgaagatattattatggaggcacaatctaccaatactcttgaaaacatgaagtttagtaaagaaattatggaacgtgaaaaaccgagtggctatcacgcaatctttacttcaaataactaccacatttttagggccggaatgtatgccgaagatgttggtttaaaaatcgacggtatcggttcaaaaactgcacgctactatttgccgaatgcttttcttagagaatttattgcagtagccttaatgaataaacgtcttcatctgattgtttgtggattgattacctttgggtttgtagccttggcgatccttaattttctttttgtccgataactaatatgcttttgcccttcaagaatcacaaaaaggcagcttctccttatcttttagagaagctgcctttatttctattctgctcgcaatgcaattgcagcatctttcttcgctgccattcttgctggaatatgaccaccgatcatggttaataccgttgaaacaatgatcaagataacgccgtgaactggatttaattgcgcaacattttctaattcagtcatattgtataaaatcgcattgattggaaaagttgccaagtaggcaatcaatacgccaagtgttccagatgcaacccctaaaatacaggtttctgcatcaaatacacgagtaatatctttttttcgtgcccctaaagctttcaaaacaccaatttccttcgtccgttcaatgactgacgtataggtaataataccgatcatgatcatactggtcactaaagaaattccagcaaaggcgatcaatacataagtgatggcatccatcaaaccaccagtcaattcagtcatcgttcctgctagatcagtatagatgattttatcttcttttttctttcctttgttgtaatcatctaaatagctcaagatttgttctttgtccttgtagttatttggatagatcataatactgctagggatactatctccccctagataagccaatgtactttctttagttgcatcgtctaatttttcatttgtcatgacgtttatgtctgtatctctttgtgctttaacaatttcagagttttcattatctttaacgattttagaggttagctcgttactataggcaattcccggtgctaaaagattcattgttgatgattccttcacccgtaaaattccagaaattttcagtgtgtcattgttggcattatcatacatcgctttgtaatcattattaggaataaagttacctgtcggtatttttgaatagtattcattgttattaatcaacttaaattcagtaccaacgattttgtcaaaatctaccttttcgtcatccttaacgtcaaatccaagatttttcaacgaattgatattggtactattattcgcatcaacaatcaatacaacgtctgtattggcttttggataagcaccagccagcaatttatagttatcctttaagaaattacctgagtctttatctagctgtgttggaaacgaagacacacccattcctgtcatactagacatcgcactcatcattgaaggaccattatctggcgaatcattagatagttttactggcttcacatcgccatcaatatcacgtaaaagattcataccaaccacacgagtaaagccaatattattactcaatttaggatcgatatcattaatataatcaacataatcctgattgattttattcgtatgctgggctttgtcctcatcactgatctttgccacaacactatttttcgtgtctttatttgacccgctggccttttctgaaccgagtgcccgatcgcgattagccgattgatctgttgttgtttttgagatcgtgattggatacttcgccatagtctcagcttgcgtgctatcgatttgcttttggaatccactggatagtgaaagcacaatcccgatactgatgatcccaatacttgaagcgaaggcagttaagaaggtccgaccttttttcgtccgtaaattattaaaggaaagcttcaatgcggtcacgaatttcattttcgtacgttttaattgaaattgttctcctttttttccttcaatatgcggatgagaatcatccataatccgaccatcggaaaatctgatggtccgatcagcatatttatctgctaattcagggttatgagtcaccatgatgactaatttctctttcgacaattcttgaattagattcatgatttgcacactggtttccgtatctaacgccccggttggctcatcacaaagtaaaatatcaggatcgttcgccaacgctcgagcaatggcgacccgctgcatctggcccccagaaagttggttcggtttcttatgcatatgatcggccaatccgactcgtcgtaaagcgtcctctgctctttgttgtttctcttcttttgaaaccccgcttaacgtcataccaagttccacgttgtcgatgattcctaaatgactaatcaaattatagctttgaaaaacgaatccgatggagttattacgataagcatcccaatcggcatccttaaaggttttagttgatttcccatcaatcaccatatcaccagaatcatagttatctaagccgccaatcacattcaacatagtcgtcttacctgatccgctggcacctaaaattgcgacaaattcttgccgccgaaatgcgactgatacaccatctaaagccttggttgtcgtatcccccacatgatagtatttcttaatgtcttttaattctaacattacgtcacccttttctttctgtttacatcgtaaagatagcatggcattattaactcaaaatgaacaagaattcatactaggttcacagtgatttgttactattattaagcaaaaaggaaggtgacgcaaatgaatcgaatacttattgtagaagatgatgaaaacttatcattactttatcaatctgctttaaaaaatgaacgcttcgaggtatttcgtgcgatgaatggtgtagatgccttaaatatcctagataagcaattcattgatctgatcatcagcgacatcatgatgccggatatggacggctatgagttagccgaaagtttacgagaagcaggctatgatttacctattttatttatcacagctaaggactctttcgaagataaaaaacgtggctttacaataggtatagatgattatatggttaagccaattgatgtaaacgaaatgatactgcgggtggatgctttattgcgtcgagcacaaattgtccacacaaaagaattagtagtaggaaaaactcggctggaccaagaaacctaccagatcaaaacaagcgaccaaacggaaaccttgccgcaaaaagaatttttattactatataaattactggcttatcctaacaaaatttttacccgtcagcaattaatggacgagatatggggcttggactctgatactgatgagcgaaccatcgatgttcatatcaaacgactgcgtactcgcttggaaaaaaattcggatttttcgattgaaacaattcgcggattaggctacaaggcggtcattcactcatgagaaaaaaattatttccacaattatggatgtacttcgttgcgatcacgtttttaatgatggtcgttgtattagcggtttttgtcggcctgctttttatagtcaatcactaccagctgctggcacctgaaaaagaagggcaccttttccctttttatttcattattttcttaagcctagtgattggtgctaccctttcattttttgtaggaaagcgaatccttttaccaatcggcaatctaaggcaagcgatgagcaaagtctcaaaaggcgatttcactgtacaattagacgaacaacagcaaatggaagacgttgaagagctttaccatgatttcaatgttatggtaaaagaattaagtagtatcgaaacattacgaaatgactttgtttcgacggtctctcatgaatttaaaacaccgattgctacaatcaagggttatgtacaattattacaaaatgaggaattatcaaaagaggaacggcaaatttacttagaacgaatgctggatggtacacatcagctaacacatcttaccgataatattctaaaactaagcaaactggaaaaccaaggcatcggactggatttccaatactttcgtttagatgaacaaattcgtgaggtcattttatttctacaaccaaaatgggagcagctaaacttgtcgctagatttggatcttccttggacggagtattatggcaacgaggaatttctttatcaagtctggctgaatttaatggacaatgcaattaaatacagtcgtaagaacagcaacatccgtgtttatctaaaaaatgataacgctgggcaaaccattatgatcagcgacgaaggtatcggcatgactgaagatgtcgccgatcgtattttcgacaaattttatcaaagcgatacaagtcgtaaaacgaaaggcaacggcttaggtctagctttagcaaagcaaatcattgaactacaccatggaacgatcaaagtcaacagttcaccaaataaaggcagtaattttaaaatatttttgccaagcaacctaaaaaattcataattaattgacgtaaaaaacgaattaattcatcattagttaatatttgtcttgtaagctatgagtaacttaaagaaagggtgactcatatggtggagaaagaaaaggttaccaagtccgtgtactttgtcgaagaaacccaaaatatcgagggcgcatatgttgaagtcaacacactttttgtcgcagataaccaagaacaagcaactgagttctacgaaaaattagttaaagagcagccaaaaaaatcctttggcttattattaaatgaatatatcattaatgcagatggcggttttttccataaccttttgcagtcctggaaaaatctaccagcagaattctatcgaaaaatgcaggtcctaacctatcgacctatagctgagtaccaaaactaacaatcaaacaggaaaaagagacactctaaaaaagattctttctcaagtttgaatatgactgaaaaacttagtaatctatttggctcttattgaagataagaacaaatacgtcactaacttttctccatactcaacgttaagaaagaacccttacaagagtgtctcatttttaaatcatggacaataagaagatagccgctaatccagtaatcactgaaatagccatcgaacgagtcttgtatgctaccccagcgactaaaaacattgcgatgatccgtacattgccgatcacttcaaaatgatttccgctgataaatacatctttaaaaactaaagctgcaaataatgagattggcacatatttcatccaatcactgaaccattgcggcacctgtcgttgggaaaaatacaacatcggaaaaagacgcggtaaataggaggctccaaataagcaaagaattagcaatagcaaagaagtattactcatgatgaacctccccaccggtcagatcgtaatgatccggtccatcatttttattatgggcagttttccaaaaacgttcaaccaaatagccggttaatgaagccaataaagtcgctaaaatcaacccaaaggtatttttgaaaaggagcatgaaaataattgctaagacgccagacaataaaccagtggctaataatagaccattgcttaattgcatcataaacataaaaatgaacatggctgtcaaagcaaaatgaaccaattcagtgtcgacatggatcacagaaccgaaaatggttcctaaaactgtactccctgtccaagacgccatcgaaaaccaattaacatataacgctttcttacggttccattcaggatcagtagaatatttcaaatagttgactgcgtaattttcatcattcattgattgtgaaaaaagcgcaatgaatgatcgtttttcttttttaaaaaattgcgacaaactggaaccaagtaaagcataacgtagctccaagaagaaaaccattaggatagtagacacaaatgatgcatgcacactaatcattgagacgactaaaaattgtgcgcctcctgaaaaaacaagcatcgatagtaaggctgttaagaagatgttaaatcccgctttttgtaaaagcataccacatgccaaaccaaccggaatgtaactaaaacagagcggcatcgccgcgtataacgcctctaaccatggtgtccttttttttacaggcatggtaagttctcaattcccttcacgttcacaggataaaaagcattttcattctaacacattctttcgaaaaagagagcaccttttgaatatcttcactcgctgttcttttccttctaatcattcgtgaaataagccaataacattaatttatttttaagattctatctattaaagccaataatccgaattatatttccatcaaaaataaaatcatttgttttcggctgctaaaaagaggaaacttttaaatgattcttatgaaaaattcatgtacgttttctgctatatcagctttttactagaaaattcaagagctgattgtgaatcgcataaaattttatcttaatccgctgaataatttaatatatgaaaatacctatgatattgattatcatttttctgaaaaaatatggtaagatagtcagcgaaaagagatgagtaacaaatgactactagttttcatgagaatcgttcggtcggattgctattgaccttcattggcggaatgatggatagttatacctatattcgttacagcgccttcgcttcagcccaaacggggaatataattttagcaatcattcaagcctacgatcggcagtggagcatggttggaaaaaaaatgctttccaccctattcttttttatcggaattcttttagcaaaatttatgattgattatttcaaaaagaaggaaatgcatttctggcgattatttctgctttattttgaagcggttgtcttttttataatcagcttagattttatacaaccacatcctgcaattattactatcatgattgcctttactgcggcaattcaatgggtatcctttgataaaattaacgggcttgcttatacaaatttatttacaactggtaatttaaaaggggtcgcaacaaatctttacgattatttggctaccaaaaactccgaggctaaatcacgctttgtgcattttctattagtggttttggctttcatcgctggtgcgattgtctcagttttttcttatcgaatgattggtaccgatgcggtcttgattatagctggtttattcctatatttagccgtttctgaatcgttcttggtatggcggttccaacgaaatacgaatgctttccaaaaaaaataactcttcagcgaccttgctgaagagtttctttgtctttaacgattaataaaaatgataaacagtaccattcctaaacataggccccccattacagtacctatggcaatgagacgcttatctaattttgtttcaggaacaatccgccgtaacccttgataaatacaaattcctaagaaaccaccgataaaattcatcagaacatccgttacatcggtcgccccctattcttaagacaaattgcattccttcaatgaatagcgagaataaaaagagaaacgccaacttcttcatgaacggcaagccctttgctgaaattcctagaagaactcctaacaaatcaattatcgaacaaaggcaatctcaatatctgcattactagtcctaacttctaactcttttgaaccattcttttgattgcctaaattgtttgaggcattacttgtttttgacgtgatcgaaaaatcttctttattaccaataatcgttccattcacctctgaattactggtttcaagagaaagcgattctttcggtttcacattcattagattaatcttcccatttgacgtttggaattctccctcattaaaattcaaatctgaaagatccattttaccattgctcgtttcaaaggacccatcatcaaatttgagctgtgaaagctccacttttccattgctggtttctgcatccacactattggcatcgacatcattgataatcattttgctattgctagtttccaaatttaaattatccaacactaaattttctgttgacagcttgccattagacgtttcaacctgcaaatccttcagcttagcttttggcacttcaattgttactctagggctgctgtttccgaaattaaagaaatcaaaattaaaaccaatacttcttttacgctccaaagttaaggtattattcgtttgtttaatgttgtatttgatatctctgctctttttatagttgattcgcgttcgattcccagacacacccacaatatcgaccggcatattccgatcatctacaaccaattcccgaacgggctttgttgtagtgaatgtctcattactcatacgattgtgaacaaacatactgctaatacacactaaagccgcaccaattaaaatcaaccctaaaactatctttttcatatttataccccttacctgttttcttatctttatcataaagaagttttcaaccgtttacatgggacaaaagactgattctttctcatcacttgttccgattaaatccagctttgatctcaatgaaatcttgaaatagtcgaaaaagttggaaaagcatagctcgttcttcgaaagactgacgactttctggtaactttttttgttgatatcgctgatctgtttcagcaatcttcgttaaaatctctgcaccatcgttgtcctctgctaaagtctgagcagtaaattcaaacagttcttgtagttcctgcacatcttctggttctgcatctagacgatttaatatctgcaacatgtcagataggacttttaattgtaagcggcgcatcgcaaaatactcaaaatagtaactattgccagaaaagaaccgattctcttcatattcttgagcgcgaacttgagcttctcgaacaaagtcgcgtaaggataaacattcctgccgcaaaagctcttccttagctggttgattcagataggcggacatttgtcccagcatttttttcatggaaacttcgacgactgcttgatcttcttgaatttttttctccgtatttggcatataaagattggcggccagcgcacagcccaccccaatgatcatcagtaggtattcattaatgatcaacggtacaggcatctcacctgctgctaagtaatgtgtgatcaaaacagaactaacggcaattccctctgctaaatcaaactgaatcgacaaggggatgaagaataatagatacaaaccgaagacaattggatgaaatcccaagagtgaaaaacagatagccgcaatactcgttgctaatgttaatgaaaaaagtctattcagtgcagtctttgctgtagagcgtttagtattggtgacagtcaagatcgttatgatagcagctgatgcagccgactctaagcttaaacctccagctaataataaagcgataggtgcagccaccgcggtcttgatcgtacgtaatcctattttcatgtatatcctccctccttaaaagcttacactaaagtcacttaggaaaaaagtcgcaacttgacgaattatcttgtatagtagatacgttgtgaaagtccaaattaattatagaagaaaaattagtttatatatacaaagaaggagtgaataaaatggagagttggctttttttaggtgtcattttaataatcgcccttattgcgaaaaatcaaagtttaatgatcgcgacacttgcgatactagttttaaaattaattccccattcagataaatttttatcaatcttaaacaaacaaggaatcaactggggtgttacgctaatatcagcaacgatcctggttcctatcgctactggtgatattgtcttaaaagatttattgaacaccttaaaatcaccgttgggctgggttgcaacactctgtggcgttttggttgcggtcttatcttcaaaaggggttggattgattaatcaatctcctgaagttaccgttgctttagtgtttggtacgattatgggggttgtttttctaaaagggatagccgctggccccgtaattgccgcaggtatcacctactgcatcatgcaggtcattcaagtcgtgacaaatcgttaatttcttgaacccctaattcttttctagcggaaataattaggggttgtttgtatctcataaaaatcttttgtaagatagaaacaaatgatatccatcatactcttcataatagttgctttaatacctactagggggtgtaataatgcgagaaaaatccaaagctgctcgtttgcgtcaaatcgtgaaaatcgttaaccactacagcgtcgttaaaaatattactcaacaaaagaatccagaggaagttcgtaaggccttcgaggaattaggacccaccttcatcaaagtggggcaaatgatgtcagtcaggacagatatttttaccttagacttcactaaagagctgcgaaaattacaagatgacgtgaaaacagatgattttgactctgttaaagccttagttgaaaaagaattagagctacctttaacagaaattttcgagagctttgatgaacagccctttgcctctgcttcaattgcacaagcgcatcatgcgcggctaaaaaacgggcaaaaagttgtcgctaaagttcaacatcctgggattgcttccgaaatcgagttagatctatctttgtttgaaaaagccatcccaatcgccaattgggttccagaaagcaaagtcattgatctcaaaaatattttaaaagagattcgtgtgtctctacaaaatgaattagattttcaaaaagaactagaattagcggaggaattttatcgtttaaacaatgattggaaagaaattcgagttcctaaaatggaaccagcttactcttctaaaaaagtcatcgtaatggagttaatgcctgggacaaatttaaaggaactaatcaatacgaaggatgaaaaaatcgtccaaggcgaaacaacctataaggaattaaaaaagacgattagtcaattattgatcgagcattttatgaaagaagtttttgaggatggtttctttcatgctgatccacacccaggtaatcttctattgcagctgatgagcgaggaagaaaatcgaaaggatcaacagttgaaaacaaaggaacgtcaaggaaaaattggcaatatcccttatgagattaccatttctcgcaatgaacagctgcgaccctttcgtctgaacgtgatcgactttggaatgatgggtactatcaaccacgagatgcaggccaagatgagtaatacgatcattgccatttatagtaaagacaatcaacgaattacgaatgctgttcacgctatttgcaaacaagtcggcagctttgatgaggagaaatttacttatgagctagatgatttcttaaatcgttatttgaacttacctgtcaaagaaatcgacctgcagaaagtattttctcaagtagtgattatctgtcatgataacaatctacagatcgatgattcagtcaccatgttgattaaagccttcggtaccctagaaggagtcatcgaggatcttaatccagatctctctttatttgaagtcgttgccccctttgcacaaaaatattttcttcaacaattgaatctgaaagatgaattgcaagaaactggtttagattacttaacttctctaaaagctttgccaaaaatacctaaccgtaccttaaatgtacttgatacgtttgctaaaggtaagggcaagttaaatttagagcttaaaaatcagcataatttcttagaacgagcagaagcaatggtcaatcgtttggtaattggcttaattctttccgctttggttatcggctcatcaattttggtccagacatctcctgaaggtgataccttgatctctgatcttggtgtctttggctattccgtagcagctctttcgattcttttcttagtcattgaaagtctctatcgtcgataccataaatggaaagaacgataacaagtttaattatgtaagaagtgggttcctagcccacttctttttttcaaaaataatgctctttcatttttttccgattcaataaaaaaaatgaaaatttccaaaaaaagttattatctccttaattatattacttttatccacatgtaaagaggaaatttactatggcaataggcagattcttttacataaaaggggtgtcattttactatttgagtgtaaacaatttaaaaatattgaagtaaggaggtgcggtatgaacaaatttctcaaaaccatcttgattattttctcactggttttactttccatttttctatccgttgtagcaatctattacttcatcgcttcaaacccattggactttagctcactgcagcaatttgtgctgacaaatcaatatgctcagctctatttattttgggtagcagcagctttagcgatcttaacggtaatcggtatcttcgtaatcatattctatccaaagagagtaaccaaattctccttgaaagaaaatcgtggcgagttagctctggataagcgagcgatcgaagggtatgttcggacaagtatcaaacaggaagactttatgaataaccctaaggtcaatgtagcggcgacgaaaaatagaattaaagtaaatgttcatggtcagttaaagaaaacttctggtttaattggtcaaacagatcaatggactaaaaacgtggaaacaaaacttcgagaattattaggttctgaagaaaaagtttcaattaaagtaaaactacaggcaattgaaccaacttcatcagaagcaacggtaactcggccgcgagtagaataggaggaacagcgatgcaagaatttttaacacgagacaaactgcctatgatctttggtatcctcggttttatcttagctgtgctattctttacaatcggcttttttaaaacgattttattgattctgatcacgatcatcggcgtagctatcggcatctatttaaaaaataatcatattttagatgactatttaaaaaaatagttacacacatcagattaccatgatcttttcttttgaaaagaatcatccattaacacaataggaggacaaaagaatggaaaacacaacaatcaaaccaacagaaccaaaaaaagatattaaaggtgaattaacctatgaagacaaagtcatccaaaaaattatcggcattgctttggaaaatgtaaatggcttattaactgtagatggcggatttttctcgaatatcaaagacaaattagtcaatagtgatgatgtaacttctggaatcagcacagaggttggcaaacaacaagtcgctgtcgatatggatgttgttgttgaatatggtaaagacatcgaaaatatttatgatcaaatgaagaaattgatctctgaggaagtcaataaaatgactcacttagatgtaattgaagtcaatgtgaacgtcgtagatattaaaactcgcgcagaatacgaagaagacagcgagactgttcaagataaagttactagtgccgctcaaacgactggaagattcgcctcaaaacaaacaaatcgtgcaaaaagtgctttgagcaatcaaacagacaaaatcagcgacaatttagaatcagaaccacgcgttaaataactcttccccattgactagctgaaccttagctagtctttttgcagtgcttctagttggactggcaaaaattattcctaaaaacatgacttccttcgcgatgtttagttggatggtaggcggaatgagtattggttcaattttttcaggttttgaaaaaattgtttccttataacgaattagccgcgagttgccagttctgcttttagcaagttagtggaatcgtagacagggttaaaatcaattgataaaacaaacggccaagacaatgttagtcttggccgtttgtttatcgattctgatatcctaaatagtccccataggtcgctgcagctttagttccttttacaattgcctgacgaacagcttcaaccgctaaaatcgagactgcttcaaaactagcattaatttgatttgcacctaaaacaaataaggtatcaccatcataggttgtatgtgaaggacgaatcgcccgcgcaatcccattatgactgatatcagctaatttgttcatcttagcttttgggaaagtcgcgttaatcatcacacagccaatcactgtattcccatcaaacaaggctgcttcattttgataatactcgaggaacaactcctccgagaagccgattcgctgctcacctggtttacgagcaccagcgattatctttccaacttcttcgtcaaaaacatctcctacagcattgacagcaatcactgcggttacccataaatttccatgtgcaatcgtatgaagtccgatcccgcctttcatagcgttttttgcaccattgatcgttccgacactgcagcctgttccagcaccataatttcccgcttgaaatggctgatcgttaaatgctgcttcacacgcttggcgtccggcttgataatttggtcgaacatctgaacgaccgattcgtaaatcaaataaactcgcaccaacaacattgggtacaaaggtgattcccatatctcgtccgattttgttttcttctaaaaaatccacaattccagcattcgcggctaaaccaaaagcactgccgccagataatgtcacgccatggacaaattttcgattattctcagatttcaaagcgtctgtatcccgtgtgttcggtaatccccctcgtacagaaacgccacctgtaactccatcttcgcaaagaattactgtgcagcccgtcatcgcttcagaatcggtatattgcccaatatgaaaaaaattttgatatgcttccatcttgtcctccagagatattttctctaattctagctattcccataaaagaaaacaaccgcctgttatagacggttgattacttcatcgacatttttgatcgtcacagaaatcgtaccgtcaggattgttgataaattcgattaactctggattacgataaacatccaatggcacaatcaattcaattccattcgataattttaatttttgtttgccatattttttttcagtgatctcacggacttctctcaacaatggcgcttgatccacatagcctttttcaacgacttcttcttgaaacgcaacttgagctgaaacattgtctttgaaaaccttttgcgccacaactttagcatcaatctgtccgctttcttctacaatgtcgtaaacagcttccttcacgtcagcgattacatcatgtttttgattttcaaacttttccccaattttttccgcgaccttcttaatcactcgaacattttcttccaatgatggtgcgggacgactttcgatcacttgcgttgaaaagtataaacgcttttctcctgaaaatgggtattttttttcgatcacttcataactcagattgttcagattaactacaatgccttcatcggctttttgtgtcttacccgaaagcaacgcacgatgaatgatcaattcatttttcaagccagtatcgtctgaatctacgatatgtgtataaccttcatggtaattcacttttagaaaggccaaatatagttgagtgtcttcttcgtataacacgacaaaggcatccgcacttggtgcttcctcactttctttataagcttcataccaacgcgtcacaattttttcactagcgggtaaaaaatcatgttctgcttgttggcttaataatgcaaatgttgagtcctctgctagcgttcctgttttggtttgggcggaagataacttttgaattttttttatcaaatactcacgaacgtattcttttgttaaatctaattcactctgactataaatcggatcccctgattcgcgatccacaatgtgaagtgcagctttttttaaataaatatccataagttccctgctttctaaaattgtgacttttaattctttctatgagctaaaaaagccagctttttttaacgtaactgcgtaaaacagtattgccaacctgactatcatacacaggaaacagggaaaatggcaactattgttttaataaaagttccctagttgcttataggtatcaaaaaagctggaaaaattccagcttttttaatacctatcttgctttaataatattgatgatttttttcttggatctgctgtttaaccaagttcataaattcgagcttggtcatttgcttgattttatcgctgccatgtttacgaactgcaaatgttccttcttttatttccctgtcgccaattaccaagatgtaaggaattttccgtaattcagcctcgcggatttttttgcctaatttttcatttcgcaaatctttctctacacgaatacctgcggcatgaaactcttgaaatagttcttctacaccagactcatgaggcggagctacattgataagtgcgacttgcttcggagctaaccagaagggaaatgctcctgcataatgctcgatcaagatacctaagaaacgatccaatgaaccaaaaaccgcacgatgaatcatcactggctgagcctcctgattatcttcatcaacataagtcagatcaaatttttctggcatttgaaagtctaattgcacggtggcacattgatggcttcgatttaaggcatctttgatatgaatatcgatcttcggtccataaaatgcgccatcgccttcattgatattgtatttgtagccaagatcagtcaatacttttcctaaggatgcttctgcttcatcccataactcaatttcacccataaagtcatctggtcgcgtcgaaagctcgacaccatattcaaagccaaaaatcttgtaaacctcatcaataattttcaaggccaaggcgatttcttgttcgatttgattccgtcgtacaaaaatatgagcatcatcttgacagaaggtccgaactctcaataatccgttcaaagcaccactgaattcatgacggtggacttggccaaactctgccatccgcatcggtaaatcacgatatgatcgtttgcgatccttgaagatcaagcaatgaccaggacaattcattggtttcaaagcataatcttcatctgcaaccttcgtgaagtacatattatttttataatgatcccaatgccctgaacgttcccacaatcgttgattcaagatcaatggtgttttaacttctttataatcatattttgcctgcaattctcgtaagaatctctgcaattcattccgaatagtcaagccattttccaagtagaaaggcatcccaggagcttcttcagaaaacataaataaatcaagctctttccctaatttctgatgactgcgtttttctgactcttccagataatctaagtgagcaaggagctgtgacttctcagcaaaaacaactcccatgacccgttgcagcatttcattttccgggtttccctgccagtaagcgccagaaacttttaataatgaaaaatattgcgctgtcgctaattcaagcgccatcggttcaaggaaaaattctgttacattaccgaaagaataaacaaagacttgctgatctgccattaactcagccagcgcaaatagcttcaactcattgtctttaaagatttctcttgcctcggacacgcttaccgccgcactttcaatcgtagcccccattttaatttgctttttgatatggtgctccaaatcttttaagatcaatgcactcaatggctgattcacacgtaaatcgacccaaactgtttgctcatcacgctgagccttagcaaaaagagcttccggataaagcgtcttgatcgcctcttccagcaggaggctaacaagctgacaaattgccgtagttccttcaggagaagaacaatcataaaaagcgatttcagcattatctttcactggagttgctaaatcaaccaactcgccatcaatactaccaacgactgcttcttccatcagctgattttttatctcgaataaggtggtatattttgtcaccttttgtttgcttccatctggtaaaacaatttcgatttcttttgacatccaactcaactccgatccgctttttcataatattctttcctgcgtaccttttctaattaattttaacaaaaggcctgaagggttttcaataaaaaaacgtccctataaaaaatagggacgtgaatagacgtgttaccacccaagttcccaaaaagtgtagactttctggcttgtaagatagataacgggtatcacccggaccgtttgcggccgctcaaagggagtaatctggttttatcgttcagaagcttccagccatggcttctttctctggtgagacgagaaacaaactcagatattgtccttttcattgcattgtattattgagtaaagcatagccccacaaaaaatatttgtcaacgcttttcttccaaggttattcatttgatttcagagcatcaatcatattgatatgccgcaaccgaaaatgtgtcgcgaccattacaatgacggaaaaaagaatagtcaatccgccagacgaaagatatgcacctaagcgaattactaacggaaatgtgatagtctccatcgatgcttgatctaaaataaatttggtcaaaataatccctagaccgtaaccaaacaaaattcctaaaatagtaaagacaaaattctcacgaaaaatgtatgaagtgacttctcggtcataaaagcctaatactttgattgttgacagttcccgtactcgttctgaaacatttatattcgtcaaattatacaacacaatgaacgccaataagcctgataaaacgacaaagatccatacaatcccatcaagattatccattgattgttcttgagcttctatttgcgtagagataaaagaagtatttaccacttgaccagaactcaacagtttttgagacagttctttttcctctgatttagtcatttttttacttttcaataaataactattcattttgaaatcttttccccgagcctgctgatagtaatcctttgataaatacaaaaagtttcctagataattgtcagcgatattggcgattttaactttaaaggtttgttgatcctcatcatggactgttaagctgtcgcctttctctagattaaacagttctgccatcttttgtgtaatcacggcaccatcatttggcaaattaaatttctcaccttgattcttcaaatgcaagtaatttataaacttttgctgatcttttggcaccatcatggtaagtttctgattggcctgtcctttttgttttaattcaacggtttgattcatcattgccaattcgctagtaagctttttattctgagaaaagatcatattaacttttgcttcatcaggttgatctttcagagtgacaatcgcatcataatcaatgatcgggccaaattgtttatcaccgactgaacttagtgaatctttcaagccgactccagcaaccatcaacgcagcacagccagcaattccgatcacagccatgatcatccgcgatttatagcgaaataaattgcgatagctaacctttgagttaaaactcatacgcgaccatatcggtgtgagccgttccaagaaaatccgtttaccaggttttggagccttcggttgaaggaggtcggccggtttttcatgcagctcacggaacaataccagtagagcagctcccaaactagcaaatagaaaagcaatggaggcttggatgatgggacgcggcaaataaaatgcagtcactcctgaaaaattatagcgatcactggaaagtacaaaaattaatcgaggcaatgtatgtgtcccaatcacactacctaaaacaattcctatagccgctgctgataaagcataaataatatacttgatcgaaatttcaaaacgtgaatagcccagtgcctttaaagtaccaatctctcgtcgattttcctctaccatccgagtcattgttgtaaatgtgattaatgctgcaatgaaaaagaaaaaaataggaaagacattagcgatcgctgcaatccgctcggaaaggtctccatattcttgaaagcctggattgtctgcccgttggtcaaaagaataactaggcgttttcaactcgctgatttctttttcactatcgctgattttttgttgagcctcgactagttgttcacggtttctagtaagttctttttgctgtgcatctagttcttcctgagcctttgccaattctggatttccagttggtaccatgacggcctgttgttctaactgagccttggcttgatccaactccttttgtccggcatccgccttcgccaaattatcagttacttcaacttttcttggcagtaaatccttttctgcttctgctttgatctctgccgcgcgttcttgcggtcgttctgcaaaaagcttttcaactttgtcgatattttgattcatctttttctcgtaagctttaccataggtttctttcccatcgacatttgaaaatcggagatagattaccgattttatctcactggaaaaattattctctggtaaataagcgaagaaatcaacactgccgtttccgacgttcgaaagaccgcgttcttctgtacttatatacattggtgattgtacaaatccaacgattttaaagtttttacgtttcaactgatctggctgatcaattttatatgtttgattgagacgatagccttcctctttggctttttcatccaagacaatctcattatctttttttggcaaatgtcccgattttacaatcaattgattctgctgattgtctttgtcataagaataaagcttcactacttgattcttatcactatcagcataaaacaattgatatccactttcgacttcagcatttgggactgtctctgccaatttttcatcttcttttgtcaaaccaccagttgaaataatttgcaggttcgataactcctgcttatccacaaactgactagccgaatgatttaagattgggccagttgctttgatccctacgtacaataatgtgcctaataaaataattaaaacgattgaaatgaaacggccttttgagtaaatgatttctcgtaaactcgcctttagatatgttttatttttcatctgtctactcctgttttttcgtccatttcattctaacacaaaacgttttcatgactggcacaaaaaatttcaactaaaattaagaaaggcttcgcgaactcgctcagcttttgagcaataagaccaaaatatttctaaattgcttctcaaatttagaaatatttttgcttattgccgataaagctagtttgtgaagccggacatgaatattcccgttgtaaagcaattaactcatgtgaaaattttatactttctatattgtcaaaaaaagaacactacaaaagtttccactcttgcagcgttctcttaacaatcacttctattaaatttagttcttaaatgagtgaatcggagctggaattcgtccaccgcgagcgatgaaatcatcagagccagctgcattaacagccataactggtgctctacccagcaaaccgccaaattcaaccatatcaccaatttttttatctttcgctggaatgatccgaacagcggtagttttatgattgatcacacctattgccgcttcgtctgcgatcattgccccaatggtactagctggtgtatcgccaggaattgcgatcatatctaaacctaccgaacaaatcgccgtcatagcttctagtttttcaatcgataaagaaccattattcaccgcatcaatcatcccggaatcttctgaaacaggaatgaatgcaccagataatccaccaacatgattacatgccatgacaccgccttttttcactgcatcatttaataaagccaatgctgctgtcgttccatgagttccgactgtttctaagcccatttcttccagcacatgagccactgaatcacccactgctggtgtcggtgctaatgataagtccacgattccaaaaggtacattcaatcgttctgacgcaatcttcccgaccagttgtcccatgcgtgtgattttgaaagctgtttgcttcaccgtttccgcgacaacatcaaaagattcacctttgactttttctaatgcacgcttcacaactcctgggccgctgacgccaacattgatcacacaatctgcttcacctacgccatgaaaggcaccagccatgaacgggttgtcttccactgcattggcaaaaattactaatttcgcacagccgagatcagaagctgctgctgtctctttaacaattcttcctgtatgtgcaacagcatccatgttaattcccgctcttgttgaaccgatattaactgaagcacagacaaaatctgtttctgctaacgcttgaggaattgaatcgattagaattctgtctccatgctgatagcccttttcaactaaggctgagaaaccgcctaagaagttaacgcccacgtctttcgctgctttatctaatattttagcaaattttacatagtctgtatcgggagtcgccgctgcaataattccaatcggtgtaacagagatacgtttgttaatgataggaataccatattcagcttcaatcgactcaccaactttaaccaagtcttttgctttcgtagtaattttgttataaatcttttcacaggcgcgatcactgtcgctattaatacaatctagcaatgatatccccatggtaatcgttcgaatatctaaattttcttcttcgatcattcgaatcgtttccattatttgattgatttccacaaagagtcctccctataatttatgcatcgtgtcaaaaatttcttgattttgaatactaatcttcacgcctaagtttttccctagttcatgaagctgttcacgtgctccttcaaaatctgctgtagcattggtcaagtccactaacatcatcatggtaaaataatctcccataattgtttgagaaacatcaagaatattaatttttaattccgctaatttttgactggtaccggctacgataccaaccttgtcctttccaataaccgttactacgccacgcatttgcataactcccttcagataattgtttctcattatagcacagtgatgacaaaacgatgagatttttatgaattaaatcaaacctttttatcaaaatgttcggattttgcgagtttcgcttcgtatttttagtgcgattagtagaatcgtatgcgtccaaagatagtttgattttttctttacgctttgtcagttcatcttcttgcttcaacaggttaagtagaatcacatatcttctcttcgaaaatagtttgatttttctgttggctgcttgtgcatacccacaagctctccaatatcgctttacttcctattgtcttttccctgtgatatattcagtttgacgagtaaattactataaaaagaggaggtttcttaatggaactttttgaaacaatgctccaacacacatcagtacggtccttcacccagcaaaaactaactgacgaactaagagaacagttaatcttatccgcccaaagtgccagcagctctaactttttacaagccttctcgataattgaaattaccgaagctaaaaaaagaaaaaagattgaacaaatcgcaaattttcctgttgataatggggaaaaaggcgctctttacatttttgttgcagatttaaataaacacgcacaagtcttagctatgaacaacgactctatggaacacttgcgcacaatggagtcattagtggtttcaatcgttgacgcaaccttagctgcacaatcgatggcaatttatgctgaatcggttagtctaggaatttgttatgtcggtggtattcggaataacttatttcagatgaaggatattcttgaactccctgagttaacttatccagtatttggtatgtttgtcggctatccagttaaaaaaaatgaggtaaaaccaagactgccactcaatactatacttggaaccaatacctaccaatcattaacagccgagatgatcaatgcttatgatgaaaaaactgctgactattatcaagctcgaagcacgaatgttcagagcactaactggtcagaaaaagttcgacaacattttgagtatccaagacgtcaaaatactgttgaatttctaaaaaaacaaggcttcgttttttaaacgaaaccttgcttttttcatgctggaatgatagcaatcgcacgaacattaaaccctggagcatctttgacttttggtacaccaatcgagatagcgccgccaactggtggaagctccgtcaaccgatttaagacctccacttgaaatttgtcctgctgtagccagtacagctctccaattagtcccccatttcgggtacaattcactgctgaatcagtatccagtgtctcatgacctatcgctgtaacttgtcgttcttcatgtaagaattttaaggcctccaaggaccaacctggcgtgtgggcctgcccttcttgatcgacattatagaatgcctccaaatcctcccagcgtttagaccagccactggcaaatgcgacaaagctttctgctggaatgtttccatgctcttcttcaaaagtaagaatatcttccaccgtcagagaataatcaggattttctgcaacttctttttctttgttgataactattaaaggcaataaaaaatctttgattggtaactgatccaccgccacacgatcttctacgaaatgcactggagcatcaatatgagttccatattgtgtcactaattgatactctttagcaaaaaatccatcatttttgactgtaactagtgttttttcctgcattggctgaaatgattgaaaataaggaataccaccatatatgctatgacttaaatccacccatttttgttgttttaaaaagtgtacactattcacaatttcattcatattactcctccttaaatcgctttcatttttatcttaacgataccgataaataaattcgctgtcaaattactatttatcttcaattactgaacctacgattttaaaaacgttatagaaaaaaagctgcaccaagtttaggtacagcttcttaactattcattgactaagacaatttttcctttagcatggtgagtctcgcttaattcatgtgcttttttcacaccctctgccgttagaggataagtatgtccaacgacacttttcacttttccttcagtcattaaatctgctatctcttgtaattgcttgccatccggttgaagccagatgctttctgctacagcaacgtttttagctaactcttcatctggttgactgacgattgagattaaacggccattttcattcaatactttaaagctgtctctttgaacatcgccgcccattgtatcaaaaactagatcaatatcttctaaaacctctgaaaaatcagtcgtatgataatcgattacttgatcggctcctagttcttttaatagtgcgtgattttttttgcttgctgtagtgattactgttgcaccaatattcttcgctaattgaacagcgtaaatgcctactccacccgcacctgcgtgaatcaagaccttttcacctgcttttagttttccgtgagtgaacaatgcttgataagctgttaatcctgctaaaggcactgcggcagcatcttcaaaagaagccccttcaggtttgcgtgctaacaaatgatcatccacaattgtgtagtccgcatatgtaccaaaacgagtggtctctggacgagaaaaaatttcttgaccaacttgccaatcttttactgctgaaccaatctctacaatttcgccagcgacatcccatcctaaaatgattggaaaatcccaaggcatcatttgtgctaaataaccttctcgtaatttccaatcgattgggttaactgacgtagcctttattttaaccaaaacttggtgttcacctagctcaggtaatgctacgttactttcttttaattgatctgcatgaccgtattcttctattacaattgcacgtgtttccattcatacatccctccatatccttccattataaaagtcctgttagaaattcggaaacgatttgctttaatcaaataaatgagattctaaaagataattcgtttgatacttttgcgctaactttttcaaataagacaatgcgtcattgttagtttctgtcatctgatttagcaatgtaaaaaagtgttgtttttcttctatcgtagctacttttttgaaatacccccaaacatgttcgtaagcatttctttgagcatttaaattaataggcaactttttcacctcagccaaatgctgataaaattgctcagttttcttctctgaccactgattgccggaaaaaagctgtcgcaatactaaatactccttttgcgaccgtgccatgacaaaatactttcattgtgcccattctttctgaagctcatgcattgttcccacctcctcttcagcttaacatctgataatctgatttttgaagagaaaagcttgctgattcgtctaatcatgtatctctatctcgaaatagagcattcatttttcaaaaaaaagactgtagacctcatctacagtcataaaaatatttttgtgtttttgttataaatcagcaactgttgttccttctccgaaaattgcctcccaatctcctgtaaaatcagtcactgcttgggcaattgatggcattgctaacgcttgttgaataatatcaacacccattgtggctgcttgactgccattttccaaggcggcatttacttgaccaacattcttgaaactagctgccaatatttttgtttcactctttgttcgagcgatttcttctgccatttcgaaaatagcttcccgtggatcgatattcaagttttccatccgattaaaatacggtgcgatataatccgcaccagctgcgattgcaagataagcctgaaacttcgtatagatagctgttgcagtgacgttaacaccgcggcgttttaattctttgatcgccttcaagccgggttcattgaccggaatcttgatgaataccttttgatcaatgtttgctaagatcgtttcagcatctttgataattccttcatagtctgttgccactacttgtacatgtaatgaacggtgttctccaatgatgccgcgaatttctttcatgtggtggaaaaaatctatttttccttcttttttaacaattgaaggattcgaagtgactcccgcaatcggtaaaaaatccgcaaatttcttaatatcagcaagattggctgtatctaacataaattccatctttgaaaactcccttacttttttgtatagaactagcatagcaccttcaaaaaaagatttgtgccttctcattacaaaaaatgcggaaagcttttacgcaagccttccgcagataaatttcttaagtgaatcgcacaaatgtgcattttgtaattaataaactactttcgttgattcagccgtaaaatctcttgggccgtctcttgatcggtaatcaatgttttaaggtaccctttttccagcaatggagcgattgaacgagccttcgaaacgccgcgagcaattcccactgtttgaggaaccctagctagctcagctaatgacaagcctattgttcgttgatttaaaggtccattcaaaagctttccgtagccgtcatagaaacgacaacaacaatctcctactgcttcacgtaattttaactcctcataatctgcctgcgatagcaaatctcgccactgacttttatgatagcttaaaggtccaccaacacctacaatgactaaatcgagtcgtttccaatattcttttagatcgtggaaatatttcgaattgaagattccttctgctagttcttttgtttcttgaataactgtggcatttacaaataagctttgtccattcaatttgcgggccaactcatagaccagtgtattcacatgatagcgcgaattaatatgacttggtccaccgactatcggaacgacagaaacatttgacaattgctttggatcaatcctgttcactgctcttccaacgctggcaccccaagacaagccaatcaccatatcatccgataaatgacgacgaatccaagcaccggctgcttcagctaactgctcttctttagcctcttcactgttgtcactttcatttgggactatttcaacggcagtcagattaaaggcatgttttaactgctcttctaactcaaacagactcgcatcaaaatgattaatcttgatctctacaattccttctgctttcgcttgactcaacatgcggctaaccgttgtacgatagatatccaactctttagcaatctgagcctgtgtcatttcttgttcataatacatataggcaatcttagctagcagcttctttttatcctctttcatattcgattcctcctatgagaacctcttttcctattctaacaaaatattatttactacgtccgataaagcgtgtatcattattaattaaataaacgtacagatgaaatgatcacattaagaatgtcaactcttcgcagaatatttagctaaaaagaatttcgacattcagatccacctaatttctctcttgagaaaaattttattgcttttaaataaataaggaggaaaatatatgtcagttgaagctgtaaaagagtacttctcacactatggaatggctgaccggattcaagaattccctgtctctagtgcaacggttgaactagcggcccaagctctaaattgtgctcctgaacgcatcgcaaaaactctgtcctttaaactaaaaagagcggataaaagtattttgattgttactgccggtgatgcaaagatcgacaatgcaaaattcaaagctacttttggtgaacgtgctctaatgttgaaggcagagaaggtagaatcaaccattggacacccagtcggcggtgtttgtccttttggaatcaatgatggtatcgatgtttttcttgatgattccttaaagcgcttcgaaagtgtttatcctgcttgcggtagttcaaataatgccatcgaactgaccatacctgaattagaaaaatatacacagttcaagcaatggatcgatgtttgtaaaaattgggaatagacaacgaggcagatttttgcctcgttttttatataaccccttgttcaatgattcgacagtcagccaaatatctttccagaatagatctgacttctgcttgatcaataaccgtttcatcctcaaattggtacccaaccaataatgcacgtgttgtttcctcagcaatcatcccgcgtgtcgaatcagatgttgggctaccgaatggtccggcatcgtccgctaacaccaaaagattttcaatattgacggatttttttccaatccctgtataacgtgcgcctgcttgtcccacggtcaattgaattggttctgtgattttttctagatcgtaggccccaaatggcagtttccattttaatgaaaaatagttattcagatcaacgagtgcattaatctggtacagtcctttttgctgaacaatccgccgccataaactatcagaagacggtctaaaacgagcagggtcttttcctaacagtttataaactttttttgttgtgataatctgcggattttctttaatagtatctaatgtgtcagttgattcaatactttttaataaaggattcaacatttcctgccaaattttctcgttgtgtgcttcatttttaaactcgataacactataagctagtgatacaccttgttctttcacttttggatcaatcgctaatttcatcttcttccctccgttagtttctgatttgcttttctcctattttaaacgatttcaaacgaaagcaaaagcttacttattattgtgtagcttcgatataatagctttatagaaagagagggatacactatgaaaatcacttatcatggtcactccgttctatcgatcattacagaagacggacaaaaattgttgtttgacccttttattacaggaaattctttgacagacttaaagacaaatgaagtagaaacggattggctcttgatcacccatggacatagcgatcacatcggagatatgattccaattgcgaaacacaatgatgccacagttattagtaacgttgaaatctgcagttttgcagaaaaaaatggcgtgaataagactcatggtatgaatatcggtggaaaatttgattttccctttgggcgagtaaaaatggtccatgctcaacatagctcgggatatgaagtagatggacaaatgatttatatgggtgaaccggctggttttatttttcagacagaaggtaaaacaatctatcatgctggagacacctcaaatttcggggatatgtcactttttggtgaggcctttgatatcgatatcgcctttttaccaattggagataatttcacgatgggaccatctgaagcggctaatgctgcgaaacgtttaagggcaaaaaaggttgtaccgattcatttcaataccttcccgctcatcaaacaagatcctgaagcttttatcaagctattaccagaaaatgtcggtaaggttatggctgttggagaaacgattactctttaattaaattgagacatgtgagcaattttgccgcatgtctttttatcatttctacactctgtcaatctgctacaataaaagagaactattttaaatgaaaggggtacactatgttaaattttgaaagtgattatttagaaggggcgcacgaaaaaatcctgcaacgcatgctagaaacaaatgaggaaaaattgagcgggtatggacgagataaatattcagcctccgctattaacaaaattcgtcaagcatgtcattgccctgatgccgatgtctttttcatctctggtggcacaatgactaatgctttagtgatcgcctctctgttaaaaaaaattgaaggtgttattgctgctgaaacaggccacatcgctacacatgagacaggcgcaatcgagttttctggacacaaggttttgagtttaactccaaccaatggcaagatttcagcacaacaaatccgtgcttatcttgaacaattttggtcagatgataataaagaattcatggttttcccaggaatggtctatctctcccacccaaccgagtatggcacgctgtattccaaacaagaattaaaaaatatttctgatgtctgccgcgaataccaaatccccttattcttagatggggctcgattgggctacggtttagctagtccagaatctgatttgacgttgccgttaattgcagagtattgtgatgtcttttacatcggaggtactaaagttggggccttattaggcgaagccattgtttttacgaaaaacaacgtacctgaatactttgttgcccatatgaagcaacaaggagcattattggccaaaggtcgattgcttgggttgcaatttgataccttattcactgaccaactgtatttcgagattagtcaacacgctatcgcgatggcaatgcgattgaagcaaggattggctgaaaagaattaccgtttttatttagaatcacctacaaatcagcaattcgttattctggaaaatgaacaaatggcggaactaaaaaaagcagtcgcttttagcttttgggaaaaatatgatgatacccatacagtgattcgttttgcaactagttgggcaacgaaggaaaaagatattgatgctttattggcattattatgaaaaaggcggctcggaattccgagccaccttcagtttaaaaattataaactgattaaacggtaggtcaaacaagcgatgtaacattcataactctctgaaaaacgcataacgttataacctaatgcttcactaatttttttaattcgatacttcactgtatttttgtgaataaacagctgttcgctgcaaatttgaaaatcggctccagcatctaataaaaaactgcacaacgtcatcagctgttccttgctatccataatcggcgataatacgctcagtgtctcttccacttctgcttcacccgattgaatcagcttactcgcattcgccacttgccggatctcactgatagaaaagctctttttcccatgaaatagttttggcaattgtaacgcaactttattgactaactgataggtcgttcttacatccatggtgttgcgcaaacgtggacacaaaacgatactgtcaatcatttcttgataaggacttgtccgcagataagactcccctagctctagctcagaatcattatgacaataatttcctaatagtacgatcaattgatcatccattaattgagcaacacaggtcttataaaattttgaggcgtaatctagaatatcctgtcttaatttcttttcttctctcaaatcgttcaactgtaggagccacatcaaaccgattcccttaacatcaatcttcaaatgattagccagacgatacattttttcgctttcatcactcaaaattgcctgcactaaagcatactcactgatttctccatgcttctttccccaaaaattcatcgccacctgcagcaattcaacggattgattgcattcaacctccgtcaataactcgttctcctttattaaatagaatcgcagaagaccgttttctttgtgataaagctctttgtaaaaaatcgcgaaatcatttttttgaacctgtttatcatcctccactacgactcgacgtaacagttgctctagatcaacagaagaattacgcggccatttgacctgattaatcacctcattatcaggattagtcaaaatgatattcgtccgtagtaagtcagaaagcaatctcaatgtcacctcgactgttcgcaaatggtctggcaataatgaggccttctccaaaacctcgtttacaatattttctgtcgggcgactctcaagaattgctgtcatcacttctacgatgacttcactatagcgaagctgattttgatttttcggcatttgaataatcacaaaatctagatcttctgctgtttggatcacttctgatgataattttggaactacgatccctacgtaatagaggacgatccccagcacacccattttatgtaaccgccgaattgtttcacattgcttttctatgtcgtctttgatgctgaaaaaagaagtcagtgctaactcgccagaatggtattcatttgtctcaagcaaagtaacataatcatccatatctgaaatatccaagaaagataaggatgtgaccgtttgatttaagcaattttgtccactcattaactgagcttcacgtaaagatggcagccctaacaactcttttaatttagcacccacatttattcctcctactacaatatatttataggttataaggtactactaatcccattagtaatcccttttatctatcatgttgcttaagctgttaaaatgagagggcaatggtcgggcatattcctccttggactttgcgtccgtgattaagtctgccaaccagctgctcattcacagcgttcgttttatgcaggttgaactgctgtttaccagtacgttcgtgtcacaccccagtagattgaatcggcaatgtgtttacgctggctttccattgcgacaaaactgaaggagctgattgtcttgaacgcagtaggtattgatgttgctaaaggtaaaagtgttgtttcgattctccgacctttcggtgaagtgatctctagtccctttgaactctgtcatacttctagtgccatcgacgacttcattcattctctttcaaacctagaaggagaagttagaatcgtcttggaatacactggacgctatcacgaacccattgctcgttggctctcggatgcggatttttatgtcagtgtggtcaatccaaaactcattaaagattttggaaacaattctcttcgtaaagtgaaatctgacaaaaaagatgcactcaaaattgctcgttacgctcttgacaactggaatgacctacgacagtattgctttatggacaagacaagagatcaactaaaaaccatgaaccgacagtttgatttttacatgaaacataagaccgctcttaaaaataatctcattgctcttttggatcaaacctttcctggagcgaatacttttttcaccagtcctgttcgaaaagatggcagccagaaatgggttgattttgtcgcctctttttggcacgtcgattgtgttcgcaaggtctctttgagtgtgttcactgaacgttatcggaagttctgtgtgcgtaaaggttacgacttccatccagataaaccagcgcaaattttcgaagcctctaaagagttgattgctcttttacctaaagacaaaatgaccaaaaacttaattatgcaagcaattgaacagttaaacactctttctaggactattgagcagttacgcctacagatggatcaaacagctgcacaattaccagaatatcctgtagttatggctatgaaaggtgtaggtccttctttaggtccacagatcatggcagagattggcgatgttcgccgcttttcacgtcgaggcgccttgactgcttttgcaggggttgatccaggtgtcaatcaatccagcacctataatcagaaaagtgtacgaacttctaaacgtggatctgctcaactgcgtaaatcactgtttcaagtaatggacgttttagtgaaaacatcacccgaaaatgatccagtttacgcatttctttctaagaaacgagcagaaggaaaaccgtactatgtttacatgactgctggtgcgaataagtttttgcgtatatattacggtcgagtaaaagagtatctggcttcactttcagaagaggaatgatttttgtttttgagagcataagttgaaaccagcgattatcggtggttctatttgtcatgccttcaatccagatagctctctttccaattttttgcttgactttttatttgcaggcttattcctatcaaagtaaaattaatatcgttaaaattttcacatcaaattttatttttcttctaacattatcagattcactttttattgtctatccatttttattcaaaaattataaaatctctttaatcatatgatgttagaagcagttatataggaaatgggataagaaaacctcaggagaaaaccgctcctgaggactttttgtttagataaatcattttattgtcgatcactgattctaaattcgtatccaagtacgttcttatagtattctggatacatctctccaccacatttttcgcaatcaaattgcggagcgttctcaggatcaaatgcaacatctcctgcatccaaaaattgaactacttcctttggaattttttcctttatcccacattcaagacaaatgtaatgaaccactccattggaatcgaagttttttaaaagctgcttctttttctttttcatacttacgtttcgatgcttcttccccaatttttttattctcctctcgcatgaatcgttccgattctttattcttcgcatatttcactacaagtcgtccatttttagacacactaactccactaaattcataatattcgccacatctagtacattccaatggatttactccgaattcttcggctattcgttcacaccatgattttggtttaagtgctttcttcacattcacaagcattcgttgaatctctttctggtaattacttaatacttttttcatgattgtcttgatccgccgactataaatgccgtatctacgaattgttttgaactggttctctggaatatgacgaatcagtgcaccaataaattcctctgccgacatcgtctttatcttatccgtgttagttcgtttatcatgatactgaaacatcactattttcccatcgtacaaaaggatacgatttaaagcaatgggaccacgtttcatataacgactgatatattctaatatctttttgagagaagttcggctccttttgggtgcatgcacgtaaaaaccctctgcatttttcgtgtacgccgcttgtaaaagcggctggactcgtgccttatcccattgggataaggttcttcgaatgagctttaggaccgcattctgccaatatttcctcaacattgcgaacggaaaatagtcatagtccttccattttccatccttcgtcagtccacccatggtgacgactaaatgaacatgcggattgtattctagctgagaaccgaaggtgtggagtgttgccacaaccccagcttgtatatggtgctttctaaaaaaatctaatagtatccgtgcagcttcatccattaatccttttaaaagctccttacgatacttctccttcagaaaaatctcacgtaaaccttcatcgatcgtgaagatgacgtgtcgatgcgtcactgtaaacagatcattcgccgcaacctctgcccaccgttgactttccccagttgcacaagttggacaaaatttccctttacaacgaaaagccactttctttacatcatggcatccttcacagacaaatagacgataaccttttttaaggtcaccacaatcgcgaaacttcttcacttctcttttcacaacggatcgaatccttcttgtgtacctttgattgaatttctcccagttttgatattcatcaaagaaaatggcgtgtaaaatattgggtttcatatctccagtttaataggaaaaagaccagatgaaaagcggtcaaaagattgatgtatcaatcctttgacctcttaaaatgttatacttcctttaatgtcaaaaaaagataggctttcgcctacctcgaaaaatatatcttctcttattttactgcagagtcagattctataattttcccaacaattccgtaatcttttgcttcttcggctgacagccaaaaattacgatctgtatctttttcgatttgctccaatgtttgaccagttgctttggcaatcaatttgtttacacgtttacgcatacgtaaaatttcttttgcctcgatctggatttcagttgattgaccttgtacaccacctgctggctgatggatcatatatcgtgtatttggcagactatagcgatcctttttgtctgcagccaaatagattgtaattcccgcacttgcaacccaaccagtcccaatcattttcactttcggcttaatgaaacggatgacgtcatggatcgtatcaccagattccacatgaccgccttgactgttgataaacatcgtgatgggatcatcactgacagcagatagataaagcaattgctctgtcacggacttcgccaagtcctggttaatttctccgtaaatcaatatcgtgcgctgcttcaataattttaacatcatcggatttttttcttccgatttctccaattcttcctcggctaaaaattcattcatatgaacgtcctccttttcttctaaaaccagtatagctaaaaagaagaggaatgaacagaataagcctataatcaatgatattctgtaccaataaggtttctatgctaaactatgaatgaaaaaatagttattagtagcgaaattctattatctatgggatgataaatcgtattttgtgaatagaaaggggattttcgtgacctatcggaataagcctccatcaccatcactgtctccagagagataacctttctcatatttcagtaagttaaaaaaattaagaccttaatagaaataggagcaatttgtatgattgaggaaaagaaaagctttatctcatggcctgtacttgccatgatgtcatttgttacagtcatcggctttgatgatattatttataattttgctaatcaaggattaggtgtgatcacttcttggataattttactgctattatacgtgattccctattctttaatggttggccaattgggttctgtttttaatcatgaaggcggcggtctgacctcgtgggttcgaggaaccagcggtgatcgtttaggttatttcactgcctggacctactgggcagcgtcaattccttatgtagttgatactgccaatgccgttgttgtcggctttggttggttgatcaatggaaatgattcaatggaagacaaaatgtctaattcgatgtttgccttattaaccttctgtgttttcctagcttttattttcttgcaacgtcattttaaaaaatcactagaagtattgagcacattaggtggcggcgccatgttcatcatggcaatcttattcgtcttcatgacgttcgcttcattgtttatgcccaatggacacattgaaacgcagccaatgaatcttggagctgtcataccgaagtttgatcttcattatttgactacgattggtcttttaatctatgccattaacggagccgaactggttgctccatttgtcacgcggatgcgtaaaccgcaacgagaatttcccaaagccatgattatgttgaccgtgatgacaattttcttaacagtttttggttctttctcattaggcgtcttcttcaatgcgcatcacctgccagataacttaaagatgaatggctcttattatgcctttcagcgtttgggagagttcttccatttaggcaatactctgatgtatatttttgccgttacacaaattatttatatgtgtgcgttgctagccgtcttactagatgctatgacgcgtatgctgatttctgatactggtaaacaattcatgccaaaaaaattaacgaaattgaacgctgaaggcttaccaatcaacggctacattttaaccacagccttaagtgcgtttattctattattgggcgttttcttacctgaaatgaatgacattttcaattggttattgaatcttaacggcatcatttcgccaggtgtaacttgctggattttctatgcctttattcggattcgtctagatagtcaaaaatttcaatcagactatgtcttcattaagaatgatcgaatggccgtgtttgttggcggctggtgtttagttgttactattatcgctactttattcggtgttttaccacaggatgccccttatggttcaagcctgttttggcacgaactaattatcaatattgttggaatcgctgtgctgattggtttgggcttcattatgccaaccttagctaaacgtgaacgagaaaaaacgacataatatctagctatcagactatacaccactttcttttaaggaagtggtgtacagttttttttactattcaaaaaaaatcccactcatggtaagatgatgtctaaataagaattaattattttttaatcgaaatcatagaaacgggtgaatagtatgttgttggggtcattggtaaattgccttgcgattatggctggaagtttttctggtatcattttacgaaatattacggaacaaacgaaagatacagtaacaaaagggatttctttaggggttgttgcattggccattcaaatgtcgttacaagcaagttcttttatcattatcatcatcagtatttgccttgggggaatgatcggcgaatttctaaaaatcgaagactccatgacacgcttaggactttttcttgaaaatcgttttgctcggggcaatagcaacttcgcagagggctttgtcactgcaactttgatttatgtcattggctcaatggggattattggagctatcgaaagtggcgttaccggtaaccaccagaccctatttactaaagcggtaatggatggcttcatgtccatcatgctgactgcttcactgggcatcggtgttctgttctcggcatttccagttttgatttatcaaggcgctatcacgatttttgctagcgtcattgttcgttatttacctacagagctgctagatagtctaatgaatgaaatcagtgcaatcggcggtttgatgatcttagccattggcttaaacgtcatgaaactgaccaagattcgtgtctctaactatttgccaggtattctcgttttgatagctattatggtcgtacagtattattacttttaataagcagatgaagggagctttccttcatctgcttattttttttaccagataatattttgttgtgcctatcatcggaacatcttccagttcgccaaacacctcatacccttgctttaaatagaagcctaatgcttgataagcttttgtcgttaaagtaatcgtcgtaacttggtgttttaaagctacttgttccattttagccaacaattgactacctataccgtctttacgataagctggatcaacagctaataatgaaatgtgcattgtctgatattgctttttcgctgtgattccaccaactatatgcttatcctccttcgcacaaaaagcccattcagacgcatcgggttcaggttccgatgcaaaaaaatcaacctgctgctgatccaatatttctaataatctatctgtaacctcacccttagtaacagcttggatcttcattgaggagtcctcctttccaacgaaacatttcaatacactatttacatttctctaactcattcatgctttaaacccctgtggaattcaatcaaaagaaatgaaataaacagcttaaaattttagttccatcttcatatctgcttcgatatatttattttgagctactggtacctctttaaaaccaaacttttcgtaaaggttaatcgctggcaataaccttcgatttgtatatagaaaaacagtaattgcttttctttgacttgcaaattccaaagatttctccatcagcagatttccgatttttaaacctttatagccttccgttacggctaatttggctagttcgaagctcccatctttctgtcttatcatagcaacagttccaacgattagaccatcacaaagggcaaagaagatcattccaccattgtctaaaatactcctatggggattatttatgatttctaagtctgctggttcaacagaaacatatttttccaaccactccaatgaaagtcgtttaaactgttcggcatacttatcttcccattcaataattttaatagccaccataaaatcgtcctcccctaacccttatttaatacaatacttcaattataatggactgcttagttttttttcaaatgtaattgaacagtttctgcttttccaataacaaaaatcttcgtaattttctgttcattaaacatactatctgttttattggcacaatttcgtgaatttatccatcaacgaggtgtatactgaagtcaattaacacttagaaagaggatttattatgactgattatctgaatgagcttgaaacattttgggatgagtttgccgaagaatatgaagcgattcaacaagaatcaatatttcccattgctgaagagctgcgagattttttactagcagaaaatctccttccctgccaaacttttttggatcttgctggaggttccggtcgttatttatctacattaaaagcatatgtagaaaaatatgatcttgtagatttatcagcggaaatgttgaaacttgcagctgctaaatctagtagtactgttcagttgatcaaaaacgatcaaaaaagtttcttatcacagaataaacagcgttatggcattgttttttcagccatgaatcctgctttacaaacaaaagaagagctactcgatttttgccaagcaagtcatgattggtgtttgattttacgtgttataacagacgaggatcagctcttctcgccttacgaggagataaactctgatttgttattgaatgaacgttataaagcatttttaaatgagctgcacattccatatcttacaaaaaaatttgcgtatacaaattctgaagatgtccctcgtgatttttttcaggaatactttttgggggagttttctccagtggaattagctaaaatcaccgagaaaacctttgggaacaaacaacaaaaaatgaatcagcagtcactcgtctttgaattgatttattttcacgtaccaaagacttataatgagaacggattttaatatcaagggggatttttaatggaagaaaaaacgtttcaacgaattaaagatttaacggaactgcaaggaacgagcggttttgaagaagatattcgcgactatctgcgaactgctatcacgcctttagtagatgatgtgcagcaagatggtttaggcggaatttttggtctgcgtcaagctgatgaaagcaaaccacgtgtgatggttgcagctcatatggatgaggttggcttcatgttaacagaaatcacctcgcgcggattattcagggttgtgcctttaggtggttggaatccttatgtggtttctgctcaacgctttactctaaaaactagcaaaggtaattatccatgcatctcttcttctgtgcccccacatttgttacgcggaacaaacggacaaggacaggttaaagttgaagatattctttttgatgctggatttgaatcaaaggatgaagctttggcttacggtgttcttccaggcgacacgattgttccgcaaactgaaacaatcaaaaccgcgaatggaaaaaacattatcagtaaagcttgggacaatcgctacggctgcactgtcgttttggaagccttagaggcactgcaaaaagaagaactagattatacgctgatcgctggcgcaaacgtgcaagaagaagtcggcttacgtggagcaaaaccggctgttacaaaattcaagccagatttattctttgcagttgattgttcagccgctgatgatctagtgacaacgaatgggacttttggccacttaggcgaagggacgcttttacgtatccaagatcccggtatgatcctattaccgcggttacgggaatatctattggacactgccgaaacacacaatattccttatcaatactttgtttctaaaggtggaaccgatgccggcgctgctcatacggcaaatgaaggaatcccaagtaccgttattggtgtttgtggtcgttacattcatacccatcaaaccatgttcagcattgcagattttgatgctgctcgggaaatgctaatccacgttttaaagggcttggacgaaagcacaatcaacacaatcatcaaaggaaaatagtcgcttaagaaaaattaaataacttcagataaatcgagattatcaaggctttcctaacttatttgatgactttattaagtgaaaccagcatttttcttgcaatcaaaaatcatttccgttaagatttaaacatattaataactccttaggggagtaaccggcaacgttgttgttgtgatatcaacagtaagttaaccagcgatggttttctggtatcgtatgaaatggtgagacctaagacaagtttaaacacttgccttaggtctctttttgtcagtttttcttcacgcttcagcgtgattagaaaaatgatatgcgtacgaaaataaattccttttttcgttttttgaaaaaggatttcgtaaatattgagctagccactattaacggattagtcaatcacacgcacagaacagtatcaactgccaaaagttacgaatcaagtgaaataaaaattattggaggctataaattgacaaaacacgtgtaccaacaagaaacagacggattaatgaaagacttgaatacctcaccagaaggtttgagccaaacagaagctcaacagcgattacaagaaaatggttcaaatcaattaaaagaagcgaagaaaaaatcctcgctaactttatttttagaaaccttcaaagacgcgatggtgattgtcttattgatcgttgccgttgttcaaatgattatgggagcccacattgaatcaatcgttatttttgctgtgttattacttaattcagtcgtaagtgtcatccaaacaaaaaaggctgagggctcattagatgctttgaaaaaactttctgcacctgatgctagtgttcttcgtggtggacaggagcaaagtattccggctaaagaaatcgttactggagatatcgttattctagaagctggtgactatgtgccagctgacgggcgattgctcgaagccggatcgctaaaagttgatgaggggatgctgactggtgaatcgacaccagctgaaaaagaaatcaaaacatttggtaatgatgtccctattggtgatcgtatcaacatggtctttagcggaacaatcgtgacttatggtcgcgggaaatttttagtaactgctacaggcaatgatactgagattggtcaagtcgctggtttattagaatcaacgaccgaacaaaaaacaccgcttcaacgaggattagacagtttcagtaagaaattaagtatggcgattttggttctatctttagtgatcctaggtgttcaattattgcgcgttttcttagatggttcagccgatatgacgcaagatattgtcaatgcctttatgttcgctgtcgccgtagccgtagcggcaattcccgaagcgctgcaatcaatcgttacaatcgttctttcattaggaacaaagaaaatggcgaaacagcatgcgatcattcgtaagctgcctgcggtagaaacactaggctcaacgagtattatttgtactgacaaaacagggaccttgacacaaaataaaatgaccgttgttgatcacttcttagccgacggacaaagcggagaattttcaaatgatcccaagcaatgggaagcagatgaacaacgtttaatcgaaattagcgttctagccaatgatgcaacgattagtgaagacgggacaaaattaggcgatccaacggagattgcattgatcgattatagcgaagaacaaaaccaatcgtatcgtgacttgcgtaagaaatatccacgacaggcggaactgccttttgactctgatcgtaaattaatgtcaacacttcacacgatcgatcaacaaaaaaccatggtaacgaaaggtggcccggatatcgtttttgagcgcagctcgaaagtgttgcttgacggacaggttgtcgattttacaccagagcttaaagcacgtttccaaaaacaaaacgaagctttttctgagcgggcattacgtgtattggcctttgcttataaagaagtagcaacggattcgctaacgttagatgatgaaaaagatctgatcttagtcggattgctggcaatgatcgacccgccgcgggaagaagttttccaagcagttgctgatgccaactctgccggtatccaaacagtgatgatcaccggtgaccataaaacgactgctgttgccattgcgaaagaaattgggattttccaacaaggcgatcttgcattgactggtgctgaattggatcaattgagtgaagctgagttagccgaacaattagaacaaatcacggtctacgctcgtgtctcaccagaaaacaaaatccgaatcgtccgtgcttggcaggacaaaggcaaaatctccgctatgactggcgatggtgtcaatgatgctccagccttgaagcaggcagatatcggaattgcgatgggaaccggaacagatgttgcgaaagatgctgccgcgatggttctaacggatgacaactttgcttcaatcattaaagccgtcgaagttggacgaaatgtttttgataatatcaaaaaggctgttgcttatctatttgctgggaatttaggtgcgatcatcgcaatcatctttgccttagcaattggttgggcaaatccctttaccgctttgcagctactttttatcaatttggtaaatgattcactgccggcaattgctttaggcatggaaaaagcggagccaacgattatgaagcgtcagccacgggatccagatagcgggattttcactggaaaaacattgatttctgtaacctatcgagggattttgatcgccattgccgtgattactgctcaatggatcggaaatctgcaatcagctgaaatgggagtcgcgatggccttttcaaccttgattttaagtcggacactacaaacttttgcagctcgttccaacacgcaaacttctatacaagttggtttattctccaataaaatggttttgctggcaattcttgtttgtggtggattcttcagtctgacattattaccagggttacgagaagttttcgctattccagcaacctttgctttgaaggaaattggtttggctctagttctagcgatttcagcagttttattgatggaaatcactaagatgatcataataaaagttcaagaaccaaaaacaaaggcacaattgaataaatattaagctagatcaaccgcatgaaaaaaccgacatcaaaattctgatgtcggtttttagcttataataattgttgcagataacgttgaattcgcggattgtcactttcaaagaaagcctgactgctgccgctaaaagtaacttgtccttcttcaaggaaaacgattcgatctgctaccttgcgagcaaactctaaatggtgagttacaacaatttggccgtttcctgattctgctaaatccttgattacttgcagcacttcttgtgccaactctgggtctagcgcactcgttggttcatcataaagcataaactccggttccattgctaatgcacgagcaatcgctacccgttgcatttgtccaccagataattgttttggatgctcgtttgctttgtctaataatccgacctttgtcagtaattgctctgcctgcgtctttgcttgctctttcgaaattttcttcacctgtgtaggaccctccatgacgttttggagtaccgtcaagtgaggaaaaaggttataggcttggaaaacgatactgaaatgtccacgatattccttcaattgacgaaaggatagattttgtgggaaagaaagattgtcctgatcgattttgattctgccgctgtctggtgtctccaataaatcgatcgaacgcaacaaagtacttttccctgaacccgaaggtcctaagataacagttgtctctccgggttgaaaggttaaatcaatttcctttaacacttgattatcattaaagcttttatttaatttctcgatggttaacatgttgcttccccctaatagaccatccgtttttcaagtacggactgcaaataattcaagaaggtacaaaacactaaataatagaccgccaccatgcagtaaagcaataatggttcgtaagtgcgagcagcgattcgttgagcagtcataaaaatttctacaatcgtgatacttgctgccaacgaggtatctttgacgagactaacaaagttgttggacaagggcggcaaagcgatcttaaaagcttgcggcgcaataatacgatacaaaatctgccaacggctcatccctaaagaagcggcggactcatattgaccctgaggaatcgctagtaaagcggaacgaatgttttcagaagcatacgcgccggtattcaatgaaaaagtcaaaatcgctgcagtccatgcgtccatttggattcctacagaagggagtccaaaaaagacgataaataattggactaataaaggcgttccgcggaagacccaaacatataggaaaaagattccatttaaaatgcgattttttgaaatccgtgctaaggcagtgattaatgccaagaccattcccaaagcgaaagaaatcagagttaagggaatcgtcatttttaagagtgcccaaaacaacggcagcgctgagctttgaataatatcaattgttcgttccattttacttagtccttccctctatttagaaatgtccttcttgaaatatttttctgatagcttcgtcaaggtaccatctgcttctaactctttgatggccttatcgactttctcagctaattctttatcatctttatggaacattgcggctacttctgtggcttcatccgaagttttaacgattttgattggcgcatttggcttttgattcaaataatcgtaataggtcacatcatcgtttaaagtagcatctgcacgattgtcgccaaccagttccactgccttactaaaaccatcaacactggagatctctgcaccaagatcttctgccatttgagcgtagttactagttaatgactgagcggaggttttgcccttcaaatcagcgaagtccttaatctcattattgtctttatttacgatcaatgctggatgagaaactgaatacggtgtactaaacaaatatttttctttacgttcaggggtgatcgacacttggttgaagatcacatcggatttatttgcatcaaaggctgctaacatcgaatcccaaggtgcttccacaaatttaactttgtagttgatttttttcgccactgcttttgcgacatccacatcgtaaccagtcaacttatcattatcatcccgaaaagaaaatggtgaatacgttccttctgttcctacacgcaaaaccttttccgagtttgcttcaccatcaccttttgactggcagcctgccaaaaacaaggcaccgacgactaataaactagcaactacaataattgattttttcattttattttttcccttctaacgcttggtttaaatcctgctttaaatcttcaatatcttcaattcccaccgataatcgaatcaagccatcattaatgccagacgcttctcgtttttcttttggtatcgaggcatgagtcatcaccgctggaacctcaattaaactttcaacaccaccgaggctttcggccaaagtaacgacttccagtgcttcaacaaattcggcaactttactttcattcactaactcaaaagccaccattcctccaaaaccgcgcatctgtttcgcagcgatttcatgtccagtatggccaaatagtccaggatagtatactttttccacggcaggatgggcaactaaatagtttgcaagtgttgccgcattcttttgatgagcttccattcgtacagctaaggttttgattcctctttgaagcaaccagctgtcttgtggtccaagaactccgccaatcgaattctgatagaaaccaattttttcagctaactcctgactattcgttgttgctaaaccagccactaaatcactgtgtccccctaaatattttgtcccactatgcaaaacaatatctgcgcccagtaataacggctgctgaaaataaggggttgcaaatgtattatcaacaattgtcagtaactcatgattctttgcccacgctgcactctcttttatatcgacaatttttaataacggattacttggtgtttctaaatagagtgcctttgttttttcggtaaaagccgcttctaattgtgaaagttcccgactgtctaccatcgtgtagcttaaacccagcggcttaaagactttttccaataaacggaacgttccaccatacacatcatcacctagaatcaaatgatctcccggttggaataaggataatgtcgcatgaatagctgctaagccagacccaaaagcaaaacccttcactccaccttcaagttcggcaattagttcttctagggctaaacgagtcggattaccagaacgtgagtattcaaaatctcccggttctcctaattttgtttgacggtatgtcgaggtttgatagattggtacactgaccgatcctgtcaatgggtcttcactgattcctccgtgaattaatttcgttgataaatgcatttgatttcctcctaatatttagtcatttcttcagcgttcatctgttaagcaacaacacatggtggttcctcctgtctttttttatatgggtactattttctaatcacgttagaatgtgataacaacggcatctagctcatttttgatgtaatcatttttctaaaaaccagaaaaatgaagttattttcgtacgcatatcattccgctaaacagcacgatcataaattttctgatccaatgaacatccctcgatctttttacactcagaaaagcgagactgacaaaaaagaggtgcagctattaaagctgcacctcttggaatcgttaaaatgagaagtatccttcttttcaaacgaactcagaacagttaataggcatgacaaaatggtatactgcttttatgcaccatacaacaacatgctgattcaactgtctgaagattcatagatttcgcaatgttgtttgtcatgagtcctgacctccttaaatgattggattaaacttagcacttaaaaaatgagaagtcaatcaataaactatcagaaaaaaagtaaaataactaattaaataattagataaatctaaatagcacattaatttcaggcatttatccaataaaaacagagttataaaaaacgatgtatttaaatttttaatacatcagaaaccgagtaattacctggtggctgtttagccaaaaatagtgcgcaatcgcaagctccttttgcgaaccctcgccaatcggtcgaatgatgactaatctctaaccgttcaccgaatccgccaaagaaaacggtgtggctacttggtgtatctcccatacgaacagagtgataaccgatcgttccctttccacgttcgccagttccttcacgtccatagatcgctaaattcgaaagctcagctcctaactcatgtgcaatcaactcacctatttcttttgacgttccgcttggtgcgtcctttttccagcgatcatgcatttctacaatttcaatatccgtttcttctccaatagccgcggtggccaactgcaataatttattcatgacatttaccagttttgaagtattggcggcatagagcattggaattgtctctccagcttcacgaaataatttcatttcttctgaactaaatccagtcgttccacaaaccaaagcttttctatgtttcttagctaattgtaataccttcaagcccatctctcttgttgaaaaatcaataataacatcgcactcgtcaattacttcttccaaattatccacaacaaatactcctagattacgtccaagtaatgccgtctgtcctaaatcctgacctatatagtcacgatcctttgctccgactccagctattagctctaattctttactatcagcagctatttgcgtgattaagcgccccatcttcccccgtggtccaacaacgattgttttgatcacatttttccctcctgtactaactataaaacgatttcaaaaatagtttaccatggaaagaacttcattgatgcgaaatcaaagaaaaataaaaaatcacccgtagatatctctacagatgataaccttgaacttaattaaaaaaacattcgtaggaacgaccataaataacgtaataatcgaaataaaataaataagaggaaaatattacctaaaataaagctaaccgcatttccagcactcgcctttaaattactcaaagtaaatcgtcttaaaaagcgtggtactgagctataaccgttacgctttaaacggaatttttcttcatatgtaaggtcaagcatgtcataatagacaatttgtagcggctcccgagaaaaaaaggcttttgagaatccaaccatcattgtgtactgtttgttattagaaggcagattgcgcaccccttttttattgatccggactttttcagcatctatcacattgtagctgtattcttcttcttgaattttatgaatctgcacttctggttgattttctgcgagaaaagcttgatagacttctgaaaatttttgtttttctaaaaataaataaaccattgcacaagctagtattcccatcaataagatattcaaaaacaagttatcttggaaaatactactgtaagctataataataactaatgcaattccactaaccataagccgtttccaataatagttctgatacatgaccttgattgtgcgttcataataatcaaaatctgacgctgcaaaattcatcgttctcatccccttcattactttcttgttttaagtatagctgagcaattgcttggtgtcagtccattttatttattcacgaaaaaagcaaagatagtttaaaactatcttaaaaaagctggcgcgataaaatcacgccagctttttagctatttgtttcaataacaggctttcccactatatcccgaaaaactcttaaaggaaacatttcttctggaagtgcataatcatgccctgactctgtttgccagcaggctgaaacagataactcttttgatcccgtattaattaaacgatgagccttatttcctggtatatagtgaactgatccaggacgtacttcttctaaaatcgtttcgctattttctgtcatcattaacaaaccatgaccttctagcccaaaatagtactccccagtgtttcttttcgcatgaaagtgtccttttgtcaaaaaatattctgctccaacaactcctggatataaatgagtaataccaaaatacaatcctccgggagttccttcgactaaatcattgtcttgatattccacacgatacatcaccgtttccggatctaatttttcatatgcttctgaatttaaaaaatatcccgctaagtcttttgcccgagtctctttctctttgatacccgtaccttctagcttgaacgtctctccgttatacattactttacttttattgatcatcacagactccttttcgtatcatttcatgggagataattttcccatttttctttacatagatctggacggacaacaaaatcaaatttattcttatcttgttgatactgctgataaattggtaaatcagattcgatcataaactctgtgtattcacgtggtgatttctcaactagcttgtctgagcggtaactaggattctgatcccagacgattgtaccttgagcatcaaatttaggataataagctaaaccgttatgcgctcgtacgtcttcatattcaaaaccgaaatctcgtacacaccatgcgccaaaaatcattttctcagatcttgaggcgttgattgtgcagtgtgcccagccgggcggaacaatcacgacttctccagcttttgcttgaacagcatagcaacgacctggggcatctgttgctctttcctgcatatagataatcgcttctcctgtccagatctcataaacctccggtgtcgacatttgacaagccttagaaattgaatggatatgcccttgactcttgactggttcttcaccgatcgtacccttcgcgtaagcaacgacgccaaaaagtaattcgcgtttcagcaagtctgctcgatctctttctaatcctacatccatcgcgatcgaataaacgatctcaggccctgtcgccttatgatccgccagactttgaagaatatcttttaaatagcgttgctcagtttgagacggaccaaaaacagaagatggatagataaattcatgggaggattcatcaaaggttatacctagtcctgtatcaatcattttctcacctcttaatttacgataaatttctgacaaatgcttgaatcactgctacctctttatttgggtcaccttgattgactaatttgtactctttgattgtttctggaacgatgaaagtctctccgtaatgaatctcaaaaggttcaaagctgttattcaaactttcgaccgtgattgtctcaccttccactaagttcaacatgttgacgctttgatgaacatccactatcacttcttttttgaaccaatgacgatgagtctcaataaactccagttcatgcaatccagtcttttcaactcgtctttcactatccttatgaagtgtttcaaccggattgatcagattttcttggacccaagtcgtgtcaaaatcagtattcacattttcttctccatgtgccaaatggacaggtcttggaacaccatctaatcctaaacgttcccaatcccatagtttaaaggtaaaaatgtacggtgtttgactgatttccaacaccactgtatctggtccaccacaatgaatcgtaccagctgggatcgaatagtggtcatgttttttcactgggaaacaattgatgtatttttcatctgggaaacgatagtcgcccttttctgctttgcgcagctcattaaaaagttcggctttctctgttccttcttttacaccgagatagatcgttgatttttcagaagcctgcaaaatataatagctttcattttgcgtatagggcataccaaatttatcctgaatataatccacccgtggatggacctgtaggcttaaattgccaccacctacagtgtccaggtaatcgaaacgaatcgggaattcatttccaaagcgtgcctgaactttttttcctagtaaagcaatcggacgttggtgtaccacgttgattgctggaatttctatctcagttcctgaaaaattcagacatagactgttttcctccggtacgccatcaaaggcccaaccgtagttctccttttcagaatccaaattaaattctttcttcatccattgaccaccccaaacactggcgtcaaaatatggaactaatcggaacggctgttccacgatttgatccaaagcaacctgatagctcgttccatcgaccatttttgcctgttcagggatatttgtatcaatcaggtaatcaatttgttcagttagctgttgttttaatctatcagcgatgcgccattcgaagaagtatccgcgcttcaccttttttagattatcttctttttcattcgcggctttccagttcgacatacctgcgcgatgacgtttttgaatctcccagcgcgttaaatcggcataacataaaatatctggctgcggctgtataatcgcagcccctgtaccataaactacgatcctcttcttttcttcagctagttctttttgcacttgtttcacttcatattctggataaaaatcatttagtgttgcatgagacataatgccaaaaacacgatcttcggtcatgttcgcagcaattctattcgtcaccgtttcagcatcataggcgtagtcatccgctttaactagtcgagcatctgtcaatttactcagcagctgtttctccagttcaagtaaattaacgcccggatagcattctaaagtaatagttttcttgccatcattaaattgtttatttagttcttcggcaatctcgtcataattattccatgtttgtgcagcgtgtttaatcttgatttccggtcgcaaattatacgtcatttttacccctctttaataattataatgatatgacattagaattcttcgtcatcctcttcttctgaaaaatccattcgatcaatactttctttcccagctttgattccatctgcgatcaattgctggagttcttttccttcacgcatcaatatcatatctagtagcatcgccagattcatgccagatagcatctcaacctccatgccagtttgaaccagaatatcataagcgtttgttccaggtgaacctgatggaatatcacagacaataatcatctgtttgatttcttttggcaaatcggcaactaatttttccagtttcgctctatacatcgctactcctgattcttctaatccaagagaaaagaaatttttctgctcaccggcgacaaattcaactgctgttttcataccatgagctagttctgaatgactcactaataaaactccgatcatcgtcattgctccttctactaaattatgtttaaaacatcatttggatcaaataagcgatccctacaccgccaaaggctgcaataaaataaattccgattagttttaaggcagaaacgcctttttttgccatcaagtaccatgaaactaagaccaaaactaacggcaatagatttgggaaaataccatctaaaatctgttgaatatcaatcttcgcactgctgaatttcaagacgattggcagttttaaattaacatagcttgccgcgactccgccgatcacgatcattcctagaactgaaaaagcttgcgtgatctgttgcgctttttctccgacaaaagtatcaacggactcagctcccagttcatagcctttaaaaaataagaagcgtgaacctagcattatgattgtattgtaagcaacgatataaaagattggtcctagaatactacccttttctgataatcccatcccgatcgaaagcaggatcggaatcagcatcccaggaatcattgaatcaccaatccctgctaaaggccccatcaaaccgacttttaaaccattgacaaaatcatcatcgatttcttctttacctaatgctcgttgttcttctaacccaacaacaacaccattaatcaatgaaccgatttgtggttccgtattgtaaaaaacagagtgtcttttcagcatcgctttttgtgcttcaggattatctttatatatcttttttgcgattggctccattgataaggcaaaaccaaaggcttccaagaattcaaaacttgtcgctactaggttgtacatcatccaacgaatatacgatttattcaacgtttttttatctagaagttggtaagattttttttgttccattagaattcctcctcgtcatcgaaatcatcataagaaccttcatctgtagctgcttttagtgttggtttagattttgcctggaaatagatatacgcgatcactcctgctacaattgccaaagcgatcatatttaattttaggaaaattacgcagacaaaaccaaacaagaagaatagtagcataatgtcttctttgacaaccgccgtgagtaacatgacgatcccgattgcagggagtgcaccacctaagatgcccataacatcaattaggtattgcggcatactggctaataactccttagcaaagcttgagccaaagtagattactaaaaatgacggaataaaacgtaaggcaaagctcagtagttgtggtccaatgattgaattaaaatgaaaggctttttcgttgccttcttcaatcgctttttgtgcccgatgattccaaaaagaattggcaacctgaaagaaattaaacacgatcgtaccgataacgccaattgttgtagctaacgtcacagctacttctgttgatgagttagataaaatagctaaagcaattgccggatatgccacaaaatttaaatcagccggcatctgaccgccaggagtaaccattgcaatatacactgcctgaatagcgactccaataataattccctgagtgacatctcctaaaataagtccaattaaaaaacctgatactaaagggcggctaatcgtataccagccgccggttaaccccatcaaccaaggagtgccgagagcacctaagtaacatagtagtgagattaatacagcttggaaaaagagcataataatttcctccgttctttatttttcgatatctttccaagtaaagccttttgaatccggtaccaatttgaattgaatgtccatccctaattcatctaaacgcttgaaagcagctcgttcaccttcagtaattgctacattcggaccaatttttttggcaccttctcgtgcgctcatgggcccgacatttaaaatagaataacaagaaatgaaatcagctccagcatcatacaaacgtacaagtgtttcaggtgtttttgcgattaaaaaataattttttttgctgttgacgatttcttcccacttcaaagccgtgcgatcaactgtcataacgaagcctttcaatggtttaggaacagcccctttaagagctttcgataaagttgaattgttggctgaacgatcgtccactgcaatcacgccatcacaagcacgttcactcatccatcgtgttaccacttgtccatggataatccgatcatcaattcgaataaaagatattgccattttttccactcctgttcttttatgtcattttgttataacaatagcacattcaaagtatatgctatttttcaaaaaaagacaacgctttcttcctactttttaaaaaaagtgcaaaattacttatcgtattctgcacttttcgtccattaaatttcaatgtaataacggtattgatcgccaatatagtaacagtcgctgatttctttgtattgtccatctgctcttgaaaccatccggactctttttaaaattggagtattctctggtacatctaagacggcttgcagttctggtgttgcacttaatgcctcgacatattctttgctctcactcatgacaatatcaaaggttttcaaataatcgtataaggaaccataataatccttgctatctaacgaaaatttttctgtatagggaatatgtgtaacgaaataggcaaaggcttttccatcatcaactcctcgagttcttcttagctgaagcacttttgaccccttttcaattcctaactgttgagaaattctttctgaagcatcaataagttgaacctgagcagataaagttcgtactttttttcctaactcctccatttcacgagtaaagctacggaccattgtataatgttccttttccgtagaatgatccattgataaaacaaaggttccttttgctcgttcgcgatataaatggccttcacgaaccaattcgtcaattgcttttctaatggtgattcgactaacatgataaatatcacataaatctagctctggcggtattttctctccatctccccattcacctgaaataattttgaatcttaaatcatctgcaatttgactgtataaaggactagcgccttttcctttagctagcttctcattcaaaatatcactccttaaaagttctattgtcataacaataatatattcagccaaaaatatcaaccttattagtatccgttttctttctgtcattcataataattaagtttgatttagtggttcttcagatttggctttacccctttttttctaaaaattgcgtagtataatgagaaagagaaaaacgattacttttaatcaagtgaggggcacaccaatgaaaatcgccatcatcttatcaacgatcatacttgtgctagcaaatttctatcttttcctagtctatttcaaagagaaaaaaattaatgataaactggaacggttggctgtgatgttcggaaccaatatgagtgtcctatttgtcgatagcctgattctcttctttggcgccctagctgaagaaggcctattcgtgatgatcattctttctgatttttgattctgtaaactaaaactctgtcacctcaataaggcgacagagttttttagcgttcaacaaaaccgtattcgagtattttcagcttgcgtttcaaccgatcaatcaccggcatcagatcctcgattgttttccattccggatgttgtgtcaattcctgctgaatcttggtcgtctcactatttaaaatggcatagatcgtctcgatcacgtccttttcttgaacctcttttcgcaagggaagtttgccaatcacttcgtctgttaaattcatactgcggctaaaatcctgatttaggcgctgtaccatttcttttcgtagaggttctggcaacgtctgcatttcagtataagatttcatcaaaaatgcaaactcacgcggatatttcaactgcaactcgattttatatttcgtagcttcaacgaccatctctaacagatcagaggcattcgtccaaaccgaataatcgattcgctgatagaaaaaatctgaagcataagtatacgttgcctgatataacccccccttatttccataataatgaaatagcaagccttttgaaaccccagcttcttccgcaatctgatcagtctttgtctcacgatagccatgctgaccaaataaactggcgctcgttattaaaatgcgttgttccttttgcggatctttcactacttccttcattcaatcactccaagtcccgcttattgtagcccattaatccaacaatcgtcaaaataagaaaaactgcaactaagacaattgccacagtcgtatgaacattctcggtcggtacttttcccacccagcctaaaggcgaaatatttgccacatcatccgataagttcaacaacggaccaaacattttgactaatacactggcagctaaataaatccacagaacagtcgttaatttaggtaacgcaccagataagaatgttccgataccaacaaagaataaagttgccggtaggaagcccagcagcgtctcccagaaatatttgattgcaatcgggtcatccagtgtgctgttgccagtaaaaaaggcgccagctaaagttgctgtaaacaccacaacactcacgattgtcccaacactgaaatagctgaaggctaggcgtgtcttagaaatactttttgagtgaaggatttccagatagccctttttgtcatctgatttcaatcgaaaaataatcagaattccgctaatcgcagcgatcgctacaaaaaacaagcttaacatgttcaaaaaattcaagatcaattctcgattcgccgcatgaatttgcgttacaccgagaattttacgataggttggattactgccgataatatcgccaatcgtactgaagattgatccataagcctctcctagtataacaccgccaaaaatccacccaatgatactatttcgttcaatcgttaaaactaatcctaacggtgaagacaacaacctacctgcttttccttttccatcacgagttgctagaacaccgctgccaatatcccttgtcttagtgatctttacagcaatcgctaaacaaatcagacctagccctaaagtcattatgaccggaagccaattattataagtgtagattgccgttttttgaatccatccaacaggagatatccaagtccaattaggatttgtcacatcggtcatcattcggatgatatagaagaatccatacaacccatagctcataaagttcgcgctacgagaattattcgctagctgagccagcagcagactgataaaaccgaacatgattccaatactggcaatactaacgcccatcaatagatctccttgcagcgttgccccattaagatcagcagcaatcaaactagcgacatataaaattcccatcaacccattgatcaaaagtatctcaacagctgttgcgtaggttggtgccaagcgtccgactgttcgtgagcgaaccatttccaacagtcctgaatcttcctccgcccgtgtatttgagattgccaacgaaatattcataaagaccataaacattcccataaaaaccagcatttcagaagcaaaaacattcgctgtcgtatacggctcaatagcagaaaattcaccaaacagcgaaaccatagctggggtcttcaacgtttcaacaattgcattgatatctgtttgcgtcccaaataatacattgaacttcgttgaagctgaagcaaataggccaactaaaatcacgatccagataaggtgtttgatacggttttgcttcaaatttgcctttaacaaataacctgtttttgctccactattcatgagaatcagccccttgtttttcataataacgcatgaatagatcttctaaagttggcggcatagatgttaaattgataatttgtttttctgctaaaaaaatcataatttgtgtcatttgatcacgatcgactgaaagaacagctttcctgtgcgcatcgcctgaaaaatgcgccgtatgcacaccagctaattgttcaataccatcaagaggctctttcgtttctactgcaatctccaatcgtgttaaatgccgcatggaattcaagtcacccgtctcgattatctctccttcacgaataatcgcaatccgatcacacatcttttcaacctctgacaatatatggctagacaacaaaatgctcttacctgcttcttttaatttcaacacttcttcttggaaggatttctcattcagcgggtccagtccggaagtcggctcatcaaaaatgtacagctccgcttcttgagataaagctgcaactaatgctatcttttggcgattgccttttgaataggttcgcgcttttttcttagggtctaattgaaatttttttatcagttcttctgttctctgcgtacgtttttggtcatttaatcttagtagtaagtcaatgatttccccgcccgtcaaattaggccaaagaaagacatccccagggacataggaaatattcttatgaattgctgtgtcttctttccacacatctttaccaaaaatcgttgcttctccgccagactttttcagcatacctaacaaaatccggatcgtagtagattttcctgacccgttaggaccgataaagcctaatacttcccctttgttcacatcgaaggtgacatcctttaatgcctgaaactttccaaatcttttttctaccttattcaacgacacgatctggttttccatcgttctcactcctgtttttatctattcattttttagtttaaaaaaatttgctggctcgttacctatactcaaattgatttcttcttactgtagctctatatcgagagaatactcctttttgactatagagtcaatgactggctagtcaattctaaattatttttttagttacgaaaagaaagtgaaaaaagtctgtatttttcttatttctcgaacttttgacaaaagtacagtattatatagaaaaattttcgtaggagcagccgatgactattttgaaaaaactttcaccactatttctgatttgtgcagttattggtgacttttcattaccttactacttgggacgcttttattctgattttaatcaaatgacgatgatcattagtcaactaggcgaaccgactagtcctgtacaaaattattttaataatggttcagttgttacaggtaccttgtttgtcttagcaagtttcggtatttataatttctttcagtcagaatcaaaacggttcgcacaaattatagccggagcgattgctctctatggctttggcgattgtatactaactggtttggttcatatcagcgaatccgcaagtttctttagtcctgcttattttctgcatgcggcattttccgggatctcgatggtagcgatgatgtttgttccgctattattagcttgtcaggcagctctgaaacagcaaaaagttctttcgcttttttattctgtttgtctaatcggttcgatcttagccttactattgttcgctgcttattatctgccagtgattggacgatggctttcttctactcgcggattttggcaacgattatccctgttctttctctatctgccagcactcagtattgcatttagacaacttgcaaaaaagaactagctacgtttcgttgacgtataagacaacaagcaaaaaggataccacctcagccgtatcctttttgcttgtttgcttatcttaatttctttagtccaatctgtgctgccccaatagctccagcatattgcgacagattgtctcgtttgactggcgctgatacgtattgttccaagacttttccaaagatcacgcttttggataagccgcctgtgaaaaggacctcttcgcctcgtacaggtcttaattttgaatattgactgctgattcgttgagcaatagaatgcaaaacacctagtgcaatatcttcacgtgcctcacctttggaaatcagactaataacttctgactctgcaaaaaccgtacacatactgttgatagtaactggctttgcatcttgaacaaactggtccaaatcagaaatatcttcacctaaggttcgcatcatgacttcaacaaagcgtcctgttcccgcagcacaacgatcgttcatactgaactcgacgacattgcctttaccgtttagctgaatggtcttgcagtcctgtccgccaatatcaataacttgcttaactcctggagacaaatagtctgctccttttccgtggcaagtaatttccgtaactactagatccgcaggcagcagcttacgaccataaccggttgtcacaagttttagatcatttaaaacataactacgtttgaagtaatcaacaacatccgtcatcgctcctttaggatttccagcggtgggaatcaaatacttatcgattaattcctcgttggaaaaaagcacaccttttgttgtggtggatcctgaatctaatcctattgtgtacatacagcctcttcctctaacatttcgataaacgcggtgacgcgagtgttgatctgttcgatatctgaagtcgaataatccgtctctaaatacatataaggaatattcttttcttcatttaggaagcgtttgatttttaatgattccactgaaaacggaatacaattttgcaataccatgtcgattacgccatctacttgataatcgtcaatcatttggctcaataattctttacgcggctggttattagacatgcaggcacagccgatattgatgtatttatccgttaaagcctggtacacatcagattcattctcatcaactaaacgttctacggcttttgccacggtacagttttcataagcaaccaccaaaccgccattttcttcaatcgcacgaatcaccttttccgtcactccgcccatcggagaacctgttaccaagattcttggcttctcttctaaacgtttgcccgctttgtattcttctttgacttttactgtcgtttcctccagcatttgaataacttcttctttgtcaaatttgtattgtgaaccatacatcacttggaaaatctcttgacctgtgattgctggcggattcagctggcctaaccgataaaagttttgttttacctgacgttcgcggttcttcagcacaatcgcctcacgaattttttcatcagtgatctcaacacctaagaaatcctctagcttccctttgaaacgcacgagttcgctgtaccataattttttgctctcttcagtatcgcgcatatgcggcaattgcatcaaataggtatccttgaattcttccatatattcatacattttcttcttgccatcacaagtagtctcgccaaccactaaatcagaaaaatagaaatagggacatttatctgttttaccaaagccataactcgatttaattagcgggcaaagatttcgtggcaagtcttcttctgcatcgggaatcgtttcatctgacgttgaacacaaactaatctgaatcgccccaccggctaagactaattcctctggcataaaggtacaatacacacctacaacgggttttccctgttctttgatatccttaaccgctaaaaatccctgtcttctcgcttcgccaaaatcatcaaaaatctctggtaaacttgtttttaattccattttatccgttcctttcttatttggaggtcattcttttgattctcgagacgtacacccttccgctagtcgcgttaaacacgcgaagtaggatgggcatccttctcatttttagtttttgcctatgttcgatatcacaaacacagtaaagtacgcagttgtactcgccattttcccccgaaagaaaagagcacaccaaaaaaaggcctgctcctggatagttttttacttcacttgatccgaggaggaaaaatattcagttaacgcgcttagaacctctaagttttgtgttactcaaagtcatcgcctaaccatttttcccacctccaactatgtacctttaaatttttgatagatgtctttctagcaacatcccaaaagtttgtgtaagcatttacaattacctccttagtataacgaagggaattttctcccgcaatacttccaaaagagaatcgttctcatttctggtcggatactcatagggaaagaaaaaagacttgaacgtagtatttccctattttgaaacagtcctttataattcacaaaaatccaacatcatcgagatgctggactcaatttatactattttcttttcactggcacccatatctccatctcttcaccttgagtatagacttccaaaccaggtccgccagaagtcatttctccagtcatgtatccgctgttcaacagctcgtactcttcagattcaggaccccatttcgtcacgatttcgatctgagtcgtcccggatgtttttcccgtacatgggaaaactgcccacgtatttgccggaacttctacttcctccataccatcaggtgttgctgctgtggttgccgcggcaatatagtaatcaaattttttactatcctctggatcaacattataaaaacttgctccgatcaccccaaacggttcacgattaattaaaggtgctaccgtttcttgcctattaccagaaataaattgattccagaaagtctcacaatctttcatcccctgctgattttcatttgttgaactcattttcacgcctgctaatttgaagccttctaattctaagatcctgtaatccattttccattcctccagttatgtgtattggttgtgtttctctttgctacatttataatttatcatctcaggaggtgaattttagtaatgtgtcatgtttgctagggtttctcgtcatgtttgctcaaataagttaaaggttagcttgaaggaatagtcgtcgattgcataattaagcttgccatgatacttctcgacgatttggcggattgattttaggccaaagccatggctgctcttgtcttttttgcgggtggtcagcgttgtaaccttactatccgtactgttctcacaggagcccactagagagtgattaaaataaacaagttttagctgtacatattttcgcgtactgctatgctcacatgcttctcgagcattgtccaaaatatttccaattaacgatgagagatcggaatcggaaaacgtcattgtttctggacacttgatctcaaactcgcaagtaattcctgtctccttcattgttcggaaatgtaaacgcaacagagcattcaatccagtatgttgcgtaaatgagggcaattcatttgaatctagctggttgattaactggttgatctgttgatttgcatcatcttccttattggcatctaaataaccaacaatcgaatacagctgattcttcaaatcgtgtttgatttttcggacttcttgctgatgtttttctacctgctgatagtagtcctccagcaattcatgccgctgtttttgtagttgaaattcctgattcttttttgataggttgtccgacatttcaaagcttaaataaaatagaatcaataataaaacgaagctgattatcaaaataatatccctcgtgacaaactgttcggttcccgtcacgctaatgatcaatattccgatcgaaagactgcatatggatgcgatcaataattgcagaattgaaaaatttcgttggatcgaaatgtcacgtttctttctagctgaccagaaagaaaagaccattagaaaattaatcagcatagctatgcgatttcctattccaccagagcttacgaaatctagtaaattatcaacgggtaaaatcagtcgggccagaatcagcagaattccttcactgataatcgaaaaaacaataaataagacagcaaccaatcctctttgataagctttaccattaaaaaaggcctgcacacaaagtaataatagcaaagtgcttaaggtggttaaaataggtcgtaaactccctgttccagactcattcgctagattattaataaaatagtatgggacgcaggtcaagtaaatcacaagaaaaagacttcttttcggaatttgcggctttgttggaaaaaaactcgaaaacaataaacttaagctcagggatgttaaaattgtgaccggaataaaattttctaaaaaagccatccacagtcctccttattttctctgaaaagttttccttttgataagttggatcgcatcctttaacgggataaaataaattgctgagattgctcatgaaaggaagcgtgaaattttttactgatgggtaatttttcgccttcttttaaatagacgaaattactctccactgtactcaagctctccaagttgataatgatcgaattatgtatctgggcaaaaagaattccctttacttgttcccgcgcatccttcaaggttccatagtattcgtagttcgccccatcgattgtatgcaaaaaaatttttcgtccggagctttcaatgtaatgaatttgattcaagaagaaggtatagattttcttttgcgacacgaattgaaaaacacccttacgtttttgcaaataacgtaccgctgcggataaaatgctcgatgtcttctcatgatcaaaaggcttaatgataaattgaaaagccaaaacttcaaaagcctctgacatcaattccgcgtgactggtcatgaagataatcaccgcatcagaatctgcttcgcgaattctcgcagctgtttctaagccatcagccccctccatttcgatatccaataaatacatatggaaataattaggagactgctccaaaaaatccaacaaacgatccccagaaaaaaagacttccgtgttgtatttactggtttcgccatggaagacttgttcgactaatttttcaatttgaccgctcatcaagcgatcatcatcacagattgcaatattcatatccatctccttttttgatagcgtttcctctagtatacctgagaattctagccagttgtttttcaaattggaactattggaatcaaatccctgatttttaacttaaaagttggtttaatcgacaactcacaagaaaggcttcgcgaacttgctcagcttttgagcaccaggtaggtactgttccacatcagctctgcaagcagtcgctgtgtgtctcagcaataagaccaaaatatttctaaattgccaagaaacacagtgatcgaagagaactgatgttgattggcacctacttggtgcttctcaaatttcgaaatatttttgcttattgccgaaatgctagttctgcttaacggagtttagcagtaacagtatgcgtagcttgcgtagaaaagctagttcgtgaagccggacatggatatacctgctaaaaagcgatttatccatgtgaaattttatactttctttattggtcaagaaaaagctgccgcatttttgcgacagccttacaaatactcttaggacttctttcgattaaataggaagtacattcccgccaacaatacacacgaagctaacgatacgatatgtccgttgcttagtcctcgaaacaagtgatgaatgaaatgatcctccaccagcatagtgcctgccgtatacgcgatcaataaagcaccaagccagattaaccatgggaaacgatccatcagtttcaaaataacctgactgccgaaaataacaatcggaatactaataatcaaacctaaaacggctaacataaaatgaccatcagcgacaccagcaatcgccaaaaaattatccagactcatcactagatccgcaataatgatcgtacgaatcgcggataaaagtgtcgtctcgcttttgacttcagtctcttccccatttgttttcagcaaatcataggcaatataaaacaacaagatagctccaatgatcttcacataaggcaccgttaatagctcgactgcgatcagcatcaacaaaattcgcaaaacaacagcaccagcagccccaattacaattgccttattctgtgatgaagctggcagttttcgggttgcaagtgcaatcaccaccgcattatcaccgctcaatactaaattcaatacaataatcgaaagaatcttcgataaaattgcaatactcatttacctgtctcctcagtttttgaatatttatcttttctaagataccaccttttactgaaaaaaacatgaaaatgagtaaatgatttggtttgagaatccttttttatcgcagcagtggtaagcttccggtcagcttattaacctgtttcttattgccaaaaagagttagaccaaaataatcaatggcagattctggaacgtgagtcattttctcgatatattcactataagttttacagccttgggccacgtcaaagaaatcaacgactgtcagctgttcaaaatttggttcatacaaccgttcccgcatatctcgtaaaaaatcacgattgccttttaagatcgggatgggaaattcgatgattccttggtgacgatagccggtctgatcaacgacatcttgaccaacgacttcaggaaataattttccaattgttacacccataacggccgtactgttcgcaataattccctgaggcattgcttcatctacaaccatgacacattttaactcatttgctggcatcttcttcctcatttcctttcgcaaaaatgttgcgatattgattaggggtcaagccgatgaatcgactaaaataattggtaaagtggctctgatcataaaagccagtccgatttgcagtctcgatcaagctgcagccttgctccaataattcctttgcttttacgatccgataagtttcaagataacgatagggtgtaatgcccttttctcgcgtaaactgccgaaccaatgaatgcttattgagatgaaccaatttgcaaagctgatccaacgtgactttctgatcgtaatgagcttctagatactcacagatgacagcaattggttttggtgccggcagcatttgattttgtttgtcttgtgcgtagttttgcaagagctcctcaatcaataaaatgaataatgtctccttctccgacttgtcaccttcattcatgattagctgatgtaaacgattgaaatcttcagccaacgctgtctgactctgcattggcgaaagaaattttggcagctccgttcctgtaaagggctgaaaaatttctttttttagattgatacaatggtaagtgagtcggctatcatcgattccttcgcaactatgattgtcatagggattaaaggtcaataaatcgcccggttcaagtgtataggcttgattattcactaccatctttcgaaaaccttcttcaattaaccccactacatagtaatcgtggaaatgattgggaaaattttgcgatacaccagtgaaggaataagcttcaatccctagatcctcgtcataacaaataattttctgattcaacgcctcgccccctttctttttcctattgtaacaagtctgccgaagcagtgcttggaagatattgactttatggtatcatcgaatcaaagataaaattggaggcgaatacatttgaagcataaagatcattacaacgatcaatatattttagatctatctgaaaaattgacacaagcagtgcctgattttaataaggagactttttccaattctctaatcggcaaactggaggataaagaattgtttgcaagatttgattttattgtcgatgccttagagacaaatcttggatcagactatcgagaaaatctccaagccttctaccagattctcggaccggagttagagcaatcaacggggatgtttagctttggttggtggctttggccgatcggtcgttacgtggaacgacatggaaatgaagattggaaagcttctctgacctttttgaaaaaattgactaaacggtttactggtgaatatgcgatccgtcctttgttaaaggagcatccgcaggaagtgatgaaggaattgattgactggagcaaagatccgaatgttcacgtgcgtcgcttagcttgtgaaggagtgcgaattcgtctaccttggtcggaaaaaatctatgtcgctttagatgaatttgaacattatgctgaaattcttacaaatttgaaggatgatccggaaaagtttgtacaaaaaagtgtcgggaataatctcaatgatctctataaagatgctccggaaaaagctgactttctcattagcgaatggcaaaaaacacctactacaaaagcacaggaatggatcatcaaacacggacgcagaaatcaaaaataacgatagacacaaaaagcctccttcaaaaataatgaaggaagcttcctcatattaatttacttttcttgctcgtttaagcacaaatgctagaagtaccatgatgccaccgatcatagcaacccataagctgctggattcctcaccggttttcggtaattgtttgttagtttgagtgctcatacgtgtaggaacagtcttattatttgtcacattatttcctgtacctgctacatttttggtttcatcgtttgttttagtcggttcttctgtcgaacgattttttacagtcaaagtgattgacttagtactcgtttcaccttctggtgtagaagcataaaactcaatagtgtgctcgccagcttcaactaacgtattatctgcaacttttactttaatctcaccattcgttaccttgaatccatcaatcgtatctgctggattctctgttttggcccaagccataatcatcttttcatctaatttatcgcccacatacatcactttgtcttcaactaagattttcggtgtacgtttttcagctttttcttttactgtaacacccattgttttcgtaatcgtcgcacctgatgctgctaatgctgtataggtcactttataattgcccgcttttgttgtatcgacagttgattctgcccacacaccgacaccgcctgctgcacttgctttggtaagtttgtcttctttgccagacgcgtttagcgcataagcctgagcaaaattgtagggatcaaaggcctgaccgatttcaaggcgcaatgtcttttgaacgtctaatctgattgtttcattcgtatcaagaatggtaatatttacgattttttttgtcactgtattgtattcagaaaccaccgcaatctcgactgcaagcttgccaggtgcatctgttgagtgatgggcgactactacaatattcgcatctgctgttggcacttcttttccatcaggttttctaatcacgatccgctcacgaatcgcttgaatatagtcgctgccttttggcaaactaaaatctgcgatctcgatttcatacataccgatattatcctcaacaacctggataatagcgctttgagtcgtcgtatttccttgtgagttcgtcacggaatacgtcaaaagatactcaccaactgtatcagtatccactgttccagtaactgtaatcttcgaagtcaaatccccatcggtcttgtcgctcgcactgacaccttgctttggatcaaagctgctacctttgcgaatactttgagtcggtaaaatatttatcgcaggatgtgtatccgttggtttattaggtgggaatggattaacgtctaacggcttcacttctaccttttctgtttctaccgctgatgaatttgtttcattttttatctgactatccgtagtcgtctctgtacttatttttccgactggcttcacagtactgctttcagtagtcaactgctccgttgtatttttgctgttcttagttgtatttcgttttttactctgttggttagaagtcgctgtgttttcttttgcaggtgaagtattgcttgattgagtattacttactttcttcgcaggtttccccatttcgctaactgctgtttgaacttcttctgtcgcaagtgccgttggtgcagcaagcagagcaggtactattaatcccgcaagtgctacacctgttaattgttttcttttcattttttctccctttctctcttttttataagagacttatttcaacttaaccccgttcttaagccacttgcaaaacgtatttaataaatctagttatttaacacacagacgaataggtgaaaaacagtcgtaaaataactcgaaaaatatacatatagtgactctttttcaaagataccacacaaaaaccattgaatcaacggcagttccatcgtataaaattcgtaattattttattttcgcattgttaaaaaaacaataacaaaattttctcttgttaaaatattgttactttttctagcagaataaaattacgaaagaaataaatttaataattaaatccctttgttcaatatttgatttcaaaatttttttcagcatatacaagaaagaataaaaaagcagaaaacagctaaaattagccgtcttccgttttaccaaaatctaccacgataataagcaaatatctgaaaaaaaataagtggagttgtatttgtctataggaattcaattaactaatggacagttgaaaagaaaagcaaacgccaaaattgctgcaagctgattcgatcaagcgattttgttcccattttctaaaattcttaagtcacagtcaggatcattttttccgttggataattgacctcgacaattttttgactaggaagaaatccaagattcaacaatcgctgtcgatgaccaatatctaatttgtcggactctctaaaggtcgtcgtgtaaagcagccgcggtcttttatcacgaattacactcgtaataagttttttctccggctctaacttccaacatgccggtaatgctgtaaggttctcgattttttgtacctttgggtcaaatagcagcaatcccacaattcgtccttttgcccaagccagataacaatttccttcattaataaataagcgcagtgaatgaagatacgcctctttctctaaataaggaagagcacctcgcatcaattgaacaaacgcaagaatcatttcatgctccttccattttccctgtcgaatacgaatatcctgattttcaacccaaagcagataatcaattgcgctaaagggttcctcaatcaagaattcttttttctgtaaacgaaatcggtatggtgtaagcttgaaaagctcttcaaatgccttgctaaaggcctgctgactttgataccctaattgcagcgctatttcaaggattctctgatccgaataaagtaaggcctttgctgcctcattcaatcgacggcgcttgatatagttataaagagattgatgagtcgtctccttgaactcatgcagcaaataatatttggaataatgaagctgcttcgctagttcatcaagcgtcattctttcttgaagatgtgcctctacataatctgtgatagaggctactaactgagaattgttcaatgcttctcactccctttggagaaaatagagcgcgtgcatcgctcgtgtggcggcaacgaataattgctgtcttcctaataagccaggatatgttgcttcatctgcgtcaacaacgatcaccgcatcaaattccagtcctttcgactgaacaagaggacaaatggatagcctttcctgtaagcttgtcgattcatccgtcaatacttcgcaggctagtccttgattttctaataaccctcgccattcatatgctcgtactaaggtctttgtgatcaaagcaatcgttgctaaatcttgttttcttaactgttctactagttctagtatacttgatatttcctcttcctgagaactaactacccatttttttggtttcatgccatgacgcaacaccggttcaatcatgtgatcatcaataatttttttcgcacaagttataatttcataggtcgagcgatagctttttgttaagaaaatcgattgtgcgtttggataatagttttgcacgtcaggcaaatgcagctcattaatcgtagtcagagattgcgtaaaatcaccaattagcaacaccggacaggtaaacattttcttgaatacttcaaattggatcggtgtatagtcctgcatctcatcgataattaaatagtgaattttggaaaactcatccattccttcaagaaatagccgaatataaataatcgggaataaatcagagtagcttacagcctttttcatttcgaatccttgttctgttaaaaaatctcgataaagttgatggctgttggtcttattgaacatctttttcaaacgattaactagctgttttttcgttggttttctttttggttgaaaagggcgagtacgcagattttcaaaaatatcctctgcgattagttgaaaccgttgaaagattgatttcttctcgtacgctttgtatcgtctcagaataaattccgcattatactcgtaatcgccgattaggatcgattgaggagaaaatgcttcgatttttctaagatagcccttcaaatcagcaacacattttttggaagagagataacggactcgttcgtttagttgcggatctttttctagataaagcagctcaatttcttgaaagcgagaaggaacatcggcaatgtcagatagtgtttgtccaaactgatcgatcgtccattctgtcaccggctcttctcctagctcaggcagtacctgtgcgataaatctgctgaaggtacgattgggagaaagaatcatcacttgatctgacgtgatacgattacgaaaatgataaagtaaaaaagcaatacgatgcaatgcaatagatgttttacctgatccagccactccttggatgatcatatcctttgaacggttatcacgaatgactttattttgctccttttgaatcgtgctgatgatggttgacatctgtccacccttttgctgccgcaattcattttgcagcacctcatcaaaaacggtcgtatcagactccactacataatcgattgccccatccttaaacttgatctgacgttttcgttgaatgtcaccagaggctgttcctgctggtgtttgaaaatgtgctttacctaaatcataatcatagaaaatactcgcaattggcgcacgccaatcataaatcaacagtctctcttccttcgtcgaaaatgaaaaagagcctatatatattttttccgctgtctgttcaccatcataaacaaaatctactcgggtaaaataaggattctttttttgcttctccaatcgaatcaactgctttccgctaaccgtttccgcaacttgctgttgttctaaaagtcgtgaattgataaacatttcatgaggatcgatttctcctttataatcgactagatactgatgaaactgcttcgtttcctttgaaaaatgaagtagctcatctttaagaatggtttccttttcctcaatctgcttgcgaatgacttgccattcctgttgctcttctattaaaacgtccatcttaatcacctctcacaattgtggtcaaatagatagtataaatgagaagtaaaactttttttgcatcaatgttgcggtgtttttatacaaacaaaaagaaacgagtgcttatttcgtcggcactcgttggttttctatcgtttgatcatttcattttagaccagcaacaaagcgttctgtgatttcttttggtcgtgtgatcgctccgcctacaacaataccgcacacccccataccttgaatccttttcgcttgttctggtgtatgaatctttccttcagcaatcacagaaaaatctgcctccaccaatttttctattaattcataatccggcccctgagcagtccgattaacagtctctgatgtatatccgcttaacgtcgttcctacaaaatcaatccctgctttaacggcattttcgccttcatcaaaagtagcgatgtctgccatcaataattgctctgggtatttttctttaatctgttggataaactgattgatcgtcagtccgtcatgccgtttacgcagggtacaatccaaggcgattacctccacacccgtttccactagtgcatcaacttcctgtatactagcagtaataaatggttcttctggcggatattgttttttgatcaagccaatcataggcagctctactactgctttgatttctcgaatatctcgtacagaatttgctctaatcgctgctgcgccgccttcttttgctgccatagctaataagggcatcactccacctttttcactatataatggttcgccgggtaaagcctgacaagacacgatcaagccattttttatgatggttagaaattcttcttttttcattttcttctctcctatccaatctttacatgcttcttatgattttcaataataaaaggttaacacggctaaaataatctgtatagacaaaaaatctcacctaaaaaatcttaaggtgagaacatgtttacgctttttctgttgtaacaaaactttgcttcaacgtcatcactttttccgtataggaacctggttgatcattgaaaagtgcagatgttccaacgacatagagatccgcaccgattttactgatagcagcagctgtttctgaatggatattgccatctacttctatcaagggtttgtttggtttcatttttagctgctgattcaagcttttgagtttttctaaaacattctgttgaaacgtttgacccgcaaatccaggatttacagtcattaccagaatcagttcaatgacatcaaggtaaggaaatagactttctattggggtttcaggattgatagcaatccccacttttattcccaagtcatgaattctttgtattaatctctcaggctcttctgttgtttcaatgtggaatgtaagaaaatctggtttcagcggtgcaaacatttcaatatacttttctggagtcacacaggctaaatgaatatcggtggtaaattttcctgtctgaataatcggttccaatacataaggagccatcgccaagttatttacataaacaccatccatcacatcacaatggagccagtcaatcccagcagcgcgtatattctgcagctcctgtcctagtgtcaactgatttccacacataatcgatgcaactatcctttccatcttctcccctccatcattcatttcattgaaaagctatggcttcataaaaatttccatcgcggcttttacattgtccttcattgctgcagtagcctttagtgacagctcatcaaagaaaacagcgtcttctgtattgttttccaaacactcttgaacagccttgccagctgctttgttcatataggtgtaatagttgattttacatataccattttttattgctgttcgataattttcttcggatacacctgacccgccatgcatgacaaaaggtacatcgattttttctttgatttgcagaattcgatttaagtcaagcttcggttctttcaaataaatgccgtgaacagtcccaaaaccaatagccaagcaatcaacaccagttgcttcaacaaatttccgagccaaatcaggatcggtatagacatcctccaagtcctcgtaatcatcgctagagtctgagcctcgtccttcaccgccaccaacagctgaggtgaaaatatgtcctagttccgcctcaacactaacaccagctgcgtgagcgattttcacaatttctttcgtttcttccaagtttaattcatattctttgctagaggcatcatacatgaccgaagtaaaacccaatcgaatcgccttgacgcacatttcataggaggctccatggtctaaatgcactgctacaggtaccttcgccgccttagcatactgaagcataatgggtccaatttcttccaagccaatcaaattttcatgtacctcggcgtgctgcagaataaccggagactcaagttcctccgctgcttgaatgaccccgcggattgcttcgaggttcggtacattaaacgccccaactgcatatttttcttctttcgcatcttttaaaagctcactcaatgttactaacatgaatcttcctcctcgttttatttactaaaacgatattcaagatttgttgagaaaacatccgtatagacataggaaagttcaatcggtttaccatcccaataggccatgttgtttacaaccatgaccactgcaggattagaaatattcaaatattcaatctctgagtaattcgccatccgagcattcactcgttgactaacgatttccggatagattccaaattgatttaaaaccttccaaagagatttatctgttaaatcaaaggaaccaatctccgggcagcgattgaggggaataaaactttcagataaggaatacaccgcgccatcgacactccgtaagcgcaaaagatagaaaacgtactcattttccgctatcttcaattccttacttaacttttgatctgcttgaatcacgttttttttcaacactttagaactaattttctttttacgtgaaacaatgtcctcataaaacccagaaatatgcatacttgaaacaatctttacatctcgattgggaataatatatccttttccttctatataagtaacaatgccttgtctttccagtgactctaaagcacgcttaattgtcgttctgctcacctcaaaggtttctgatagctttcgttcactgggaagcggttttccttgtccgctcaacactttggctaaattttgaatatcatcgctgatttttttatactttggaataaattcttccacttaataatcctcccttcactcgtcttgtcttggatagggagatctatcaaaacagacaggcagctacataataaataattatctgatcaactaacgtttcattattgattataactgattttttatacaactacctatcatactatagttgccaatattcctttttttattgtatagctaaaattttattactacacgatatttatcacccttaatcgctgattcaaaacctgctacaacctcttcaaaaggaatgatttcactgataaacggtcgcatatctataactctttcactgatcattctagacgcccgaacaaaatcacgactgttagaattagctgtaccagcgatcgaataaccgcctttatgcagcttgtcaggactaaagctaacaggctcatctggatagaaggatgagtaaagaatcactttaccagtattcgacaccagctccactgattcttctgctacactatgaatcggcgtcgtatcgaaaactacattcgcgcccagattatgactaatttctttgaccttcgctaaaagatcttctttagaagaatcaataatatagtgagccccaatttttttagccagttccaaacgttctggatttagatcacaagcaagcacgcgcgcgccgcttttcacagccaatgcaacatgtaataatcccatgatgccgcagccgatcactacgaccaaatctccatattgaatattggcagtctcgcaactatgaaccacgcatgacaatggttcggttaaagccgcttcttcgggcgttacgccaaaataatgaaaaagatgcttcggctctaccagtatatattctgatagtcctcccatccccttatgcggaagaccttcaagatgcttgctatgattgaaatcgatacaattttgttcctcgccgctcttacaaaaatcacagtctccacaagcaaggttggtaccaaatacaactttatcgccaatctgccattttgtcggatcaattttatttcctagcgcaacaatttctgctgctatctcatgtccgccaataaatggataatcaactttttttactcctgtatatactcgctgctcccaagtacaaagcgcacaggcctcaatttttattaaaattttattttcagatacttccggtaacggacactcctcaattctcaaatcctcaattccgtaaaaaactgctgtcttcatttctatccccttcctaacaattgactagaatatattaaatgctccaaataataccccaatagccactaagaccagcattactctcgttgacttcattttcctgttttttagcaggtataaggtcagcaaggtaatccccagaggtaagatacctttgaataatttatcgagaatgtcttcttgtaatcccagcttcacggctccgactttgatcacaaaaggagaagaaacagaaacaaagttggctgtcaaagctcctaaaacaatcgctcccattgccgatgctccagtgattaaatactgcaaaatattactgcttaagattttttcgatcccagctttccccatcttgtatccctgcatccaaacaaaataagctagagaaaacatgatgccaaacatcaaaagcccatagacaactggacccatcaaatttccttcagcccccaggctgacaccaaaggctaaaagaataggtgtcaatgttccttgccacaaggtatcgccgatcccggcaaaaggtcccatcaaaccagtcttgatcccattgatggcatcatctgtgatcggcgcaccatttgctcggtcttcttccattgcaatcaccatgccgcaaataattccaccaaaatgcggttctgtattaaaaaaggccatatgtcttttcagagcattttgatattcctgcggatcatctgcataaagctttttaatgattggacttagcgaatggacaagacccgttgcttctaaccgctcatagttataattagcatgactgaaaaaagtccagcgccaaaaagaacgagtgacatcctttttcgataattctttttttggttgttgactttcattttctaatgattgctccatctcttttcctcctaactaaacccgccgatttcatttctaggtgtgatggtataaagatatgcaataatcgcacctaaaacagcaattacaataacatccagacccatataaatcgacatgacaaaccctaaaatgaaaaacagcatcgtattcggacgattgatggaacgtaaattcatcgcaatccccaatgctggtaataatccaccgattacttggagcacatgtaacggtgtgccatccaagtaccccaaaatggtcgttactgccccagcgccataataagcagctaaggttactggtatcacactgattaagaaaagaatgatttgcggcggcactacatgtaagaaattgatccgatcaagatcaccttcaccggctgccttatctgccatatgaacaaagaaaacatcgatcgtcatatgcgcgacccagataaccgttcctaatagtccaatcggcatagctaaggttaccgcagtttgcggatcagcccccgatgcaatcgctaaggctgttcctaaagtcccagccaacccaggatcaaccggtgctgttccacctgctgaaataaaagcgatataaggcaattggatcgcagctccaataatgacaccttggactggatcacctaaaataattcctacaacggttccagcaactaaaggtttctgcataaaagaaatacttcccaataacgacagccaaggtgttccagttaccccaagatagtaaacaactccaattaaaattgcttgaataaaagaaattttcattaatacccctccctaggttaatagcttcgctacgtcgatcgctttatcttcggcaataatctggatagtcactgttgctccagtatcaattaattttttgagactagctttttctgccgaagaggcagaaatatttttataaaattttgttctgccttcttttgcacccataccgccaatgtttactttctccaatgcgataccttgattcattaattcaacgtatgcttcaggcgatttagctaaaagaatcactttatccgatgctgctaactgtttaatagtctcggcaccttcatgaacgctaaagacttctgttttgatattcgctggagcgacagatgtcacgatcatcttcaaaaatgtatcatttgctgtttcatcatccacgataatgattcgattagcgccagtgtaattaagccatgaagtcataacctggccgtgaatcaaacgatcgtcaattcttgctaatacaatactcattattattcccctgcctttgcgattaaattgttatatacttcattcaaatcttggagactttctttaccgctttgtagagccgttttagccaatgcctcaacatctgtcgaaaattcacgattcacaacaatttccagcagcattgccatattcactccagaaagcactttcatttcatttgtcgttaaaagcttcatcacttcattcccaggagttcccccataaaaatctactaagacaagtacgccatctcctgtatctaatttttttactttctcctgaatctcctccctcaatcgaaccggactatctccatgatacaaaccaacagatgcagaaccctttacttcccccgcaataatagcaattgactttaaaagcgactctcctaaatccccatgtgtaacgactaacagaccaatcaaacaaaacatctccttccaaaaagccttcggttctaaaaaagaaccattggtactattcacaaatcaaatatatatccgtttcgcttctttgtcaacgaaatctttgaaaacattttcaaaacaagaaaaatggcttctgtttattaataaaagaatcattgctattttcaaaaaatatcttttatttttataattagttttataactaacacgattttcacattctctgttggatataagtcgtctgcttaatgtttttatctaacaaaaaaagccagctctgctttttttgtttaaagcaaaactgactctcttaactatttaattgtatagaaataacgaagctgttttattccttaatcttcgtcgctgctaaactaaattccgaaatcgctgtcctagtttttacaatatccgaaacgtcgttagttagtatgacaatcacaaatggattatctttggttaaaacgatgccgatatcattttcaacattttgctgttcaccagtaatattagctacagtaatattattcggcagttttgcaggaatctttgtgcgaatgacttggcccttcaaaatatctaacattgtcttttgcggttctttatcacgaccgtcatagatttttttcagcaatttcatgcaatcattcaaagaagtgtaattatccttatccgtacttcggacattgatatccaccatacggcgttcaatgtatgtgtcagggtatccttgatccttgaaatagctgttcatattccccattccataatgatcgattaaaacattggtcgcattgatatcattttgttggatcattggcgttaaccactcattcaacggtttgtcttcaattacttgattgctgccatctttttgagcaagtgcataatccataatgaaaagttcgataatattcgccgcaatcgttcgttcagaattattactagaaaactcctgcttgctcttcaaatattgcacaccgtaatagactttccccgcactttgcgttaatgctgaagcatctagtttagcagcggtcttctttttagcctttgaagttgattttttctcagagcttgcctgtttttcacttgaatttgaggtcttagtttttttctttgaagattccgttgtttttttcgttttttctttcttctcggaactattttttgttggtttctttgctgacttttttgtgctgcttacggcagattccttttttgacgatgattgactttctctagcagtgactgcttcctttggtttttcagctgtattatttaaaatgcgcgtcgctccaaaatatacgccccctgccaatagaagcgcagccagaccgaccacgacatattttcctttgtttttttcatttggatccgtatgtcttcccaaatccttcaccttctccctttcagtacttacgtttcattcaataattagtttatcatatttcatttataaaataatttcttttagaaaagaatatgtgatttataatttcttaacattattgctgaacggcttttttacttcttttagggatttctcaacttggtgaatatattagaatgtatttttatcatacctatgaatcagtgcagccagtttcttaattcttcccgcaaagaagcccatcctatgaaaatcacaagacaggcttcttcgtttatttatttttgatttttggatcaaggtaatctcgtaacccgtcaccgacaaagttggcgccaatcgacatagaaaagattgcaacacctgggaaagtggatatccaccaatagttcatattatttacaccatcagataccatcgaaccccattcaggtgttggcggttgtgttcccaagcctaaaaagcttagtcccgagaaggtcacaatcgcattcccaatatccagagttgccataactaataatgagcctaacgcatttggtacaatttctttgactaggatgcgtaaatgacttgctcctaagacttttgaggcgacgatgtactcattttccttcaacgtaatcacgagacttcgcatcagtcgagcataattgggccaccaaataatcgtcattgccagcacagagttaaaaatacttggtcctaaagccgccgcaatcaccatcgctaaaattaatggtgggaaagcagcaatcaattccgcaaaacgcatcatgacatcatcgatgattccgccaacatagccagcaataccgccgtaaatggttccgataacaatcgtaatacagaccgttaccacccctgcggtaatcgacaccctacttcccatcaaaacacgagaaaatacatcacgccctagctcatctgttcctaagaaatggcctgctgagcccggcggtaaaaaacgttccatcatatcttgtgtcaacggattccgtggtacgatcagcggagcaagaactgcaatgagcacccataacacacaaataacgattcctaatttgaataaaaagtttttttgtttcagtaatcgtttcattagctgtacctcactctcggatcaatgaccccataaagaatgtcaatcacgagattcagtatcacattaatcatcgcgatcaataatgaaacgccgcagattgccggaaaatctaatgtcgtagcggacaaatacgcgtactgtccaattcccggccacgaaaagattttttcaacaaagaccattccgcctaacaagttgctaaaccccattcccataacagtaataacaggaatcaaagcatttcctagcgcatggcgcaaaacgatctgacgctgtgaaagtcccttcgctttagcggttcggatatagtctaatgaagaaacttccaaaagattcgaacgcgtctgccgggaaatcagccccatcgtaaagaagccaaggacgatcgcgggtaaaatcaaatgggagagagcgtcattgaataacgcccaattgccactggttaaggcatcccagacataaagtcccgttccccctgtcggtgccgagattcgcgaactgactcgcccgccgccaggaaacaaatgccatttggaataaaacaacagcagcataactaacgcgaaccagaaattcgggatcgaaaccccgctgattgagatcgtacgaactagataatcaaacggcttgttgcgatagactgcagagatgatcccaaatgtgatcccgaatagaacagcgatcagcatcgccatgatggatagttctaaagtcgcagggaaaaactgtttcaaatcactgataacaggattaccggtgcgaatcgaagttcctaaatctccccgcaacaaattacttagataaataaagtattgttccattagcggcttgtccaaaccccagcgtgctttgtaagccgcaactgctgcaggatcgctcatcgcatttggactcatattcgatgcaatcggatcactgggaacgagatgcgagatcataaatactaagaacgtcaccccaatgatcaaaaagcagacaaatagtaagcgccgtaataaaaatctagccatattcctcatacacttttgccccttgctatttggttagttgatactgacatcttggaaattgattttttgtacttcgtaatagttaacgccctttaagttgtcacgataagccaatactttcggatgctgaactaagaaagcatatggcatattatctgccagtaatttttgtaactcttctgatgcggcaacgcgtttttcttcatctgattctgtttgaattgtttgcttcaactctgccatcttcgtatttgaagtgtctgtccatttcgcacgctcaccgactgtatcacctggtaagaagactagctgattattgatttccatatagtctggatgccaatgcattagcaagaaggcttcttttccttcacggtaagaatcgatcacgaccccaatctcagatgtttcaatcttggcattgatgccgattttttctagatcatctttgattttttgaccgagagtcgtccaagacatcccctctgtatcaaagttggcaaccgtgaatttcacttcgaagccatctttatagccagcttcttccattaatttcttcgcttcatcaaggtcctgatagtcctcatccttttctaaagcgccagtaaatccttttggcacgatatctagcggcaacacagctttatcgccagagattttcaataattctttataattgatcgctttacgaacggcttcctgcactttcggattggccatcggtccgccgatttcttcatcttggttcattaataggaaggtagttgttgaaccaacgtagtttttgatcttcacgccttcttgatcttttaattgcgagacattgtctacaccaatacctaaagcaatatcaatgtccccttgtttcaacatttgaatctgtgtgttcacatctgggatttctttacaaataactttatcatttttcacttcgccccagtattccttgttcttcgttaaactaagttcttcgttttgtttccatttgtccaagacataagcgcctgaacctgctgaatttgaattcaaccatttttcagctgtatctttcgaagaagcatcctctgcatccgtaccgccatgttctttgacaacttcagaatcaacgatcgcaaaggagttattcgctaattttgacaagaaggctgcatctggttccttcaacgtaaacttcactgtataatcatctggtgtttcgacactttccacattttccgtatgatgcgtcgtattactcttcagatttttggtccgcatcacactgaacttcacatctttagaagtcaagtcatttccgcttgagaattttacaccttctttgattttaaaggtatggactttttgtgaatcatccatttcgtgagattctgctaatgaaggctctggggttgacgattcataggtacgatacagataatcatacattgcgtaatacaccatattcccgtaaacttcatagccatggtgaggatccaaagtctttaaatcagatgccatcccgactaccaacgtcttatcgccatctgcactgccgccaccatcacttgacccgtctgtactatcgccaccgccgccacaaccagcgagtgtcaacattgccagacaaatgacgctccataacaacttcctttttttcataccttttactcctccttgtttttactaatgtatttaattttcctaggaaaaattaagtctgattaaaacgccgtataccatccaactagatccctattcttttatttcacagaaatttttttttgcacactccactttgaggacctgtcaaaagttggactggcatccttatgtttactaaaaattactcctctttattatgcaaatgacatgccacaaagtgattgtcctttacttccaataattcaggtatatctgtcttacatttttccatcgcaaatggacagcgggtatggaacttacagcccttaggcggattcgctggacttggcacgtcaccagtcaatacgatccggtcgattttttccttatcaatcgtcggtgcagctgagatcaaggcttttgtgtaaggatgcaacgtatcattatataaagcatcccgattcgccaattctacgatatttcctaaatacatcacggctatacgatcacacagatgataaacgactcctaaatcatgagaaatgaagaaataggttaaattcatctgttcttgcaactctaccagcaaattaatgacctgcgcttggatcgacacatccagcgctgaaacgggttcgtcacagataatgatttccggctttaacgctaacgcgcgagcgattccaattcgctgtttttgtcctcctgacatctcgtgaggataacggtttttgtattcgggagctaatccgaccatcgttaataagcgatcaatctcggattcaatttcagccttcgtcatatcctttttatgatgaatctggaagggttcagctaaaatacctttgattttatttcgtggatttaaacaagcagacggatcttggaaaacgagttgaacctttgaaccaaaagctactttttctttccgattcttaaaagcgctaacatcttgtccatcaataataatcgttccatcagtgatcgccccaagattcaacatcgttttacctaacgtgcttttcccgcaaccactttcaccgacgatcccgaaagtctcacccttttttactgttaacgtcacatcatcaacggcttttaacgttccctttttacctttactgtcgcgaatttcaaaatattgtttgacgtgctccatttgaataatcggttcttgcgtcatcatttacgtcgtcacctcagtttcttcttctgtcgaatacttaaagcaacggacttttcgtccatcttcactagttgtaattgccggccttttctccttgcagatagccatcgcgtaaggacaacgaggatgaaagctgcaaccttgcggcatctcatttaattgaggaaccataccctcgatactgcttagtttcccttttttatcattgatagttggaattgccgcaattaagccttctgtataaggatgtttgggattgtccaatatttcgcgaatcaatccctgttccacaacttttccagtgtacattacaacgacgcgatcacatatttctgacaccacacctaaatcatgagtgatcaaaatgatccccattttgagacgttcctttaattccttcaaaacttctaaaatttgtgcttgaatcgtcacatctaatgcggtagtcggttcatctgcgattagaagctgcggatcacaagcaagcgccatcgcaatcattacccgctgccgcatcccaccggacatttgatgaggatattcgttgaaacgctgctcaggtgcgggaatccctacaagctttaacaattctatcgctttttccttcgcatctgtctttgagatatccgtatggatcaacatggattcgacaatttgttttccgcatttatgaagcggattcaaagaagtcattggttcttgaaaaatcatcgctaaatgattaccgcgaaaatgctgtttctccctctctttcatagcaatcaaatcttcacctctaaatagagcttttcccgtaactgtactggttgcttcatctaataggcccatgatgcttaaagaagttacactttttccgctaccactttccccaacaatacccaatgtttcattttcatttaatagaagctctaaattatttacggcagtcacttctccgttataggtccgaaatttgactgtaagtccttcgacccttagcagttctttctccataaaataattaactccctactttttgatttttaaattatggttaaaaaataactatatattctaattttaaaactagccatttacagtttaattgttcagaattttcggaaaatattttattttttgattataccagctgacaaaagattgtcaacttaaagtttgatccactatttttgaaaatcaagcaataataactctcatcgtcctttacccaaaatcattatttttaatatgaaataatgatgagcgtttctaattttaaaaaaacgaaatttattatcaatcaaattattgtctgtattaatgccccgaaataacaaaacaagagttttcgacagtttgcttttaaaaactgtcaaaaactcttgtgtaaagaattgattgggtattacattaatttctcaaagcggctttcgatcactcctaagtgcagctgattgaagtctcggaaagattgacaaggcacagttgctttgtcacaattttctgcaatgtacaatggtttaaagcctaatttctttgcttcatgcagctgtttcaaggaattcgagatgaaattgaccttttgatgcgccaactccacctgcagaaaatccactaatccatgaggaaccgtctcagctttttcaccgttgatcgaaaaatctaaatagtcagccagatgatgctccagtaaaactcgattcatcatctcttgatcgtagaaaaccatgccgatttgctgttttcgacttttcaaataatctagcaattgctggacctttgtttgatcttcttctcgtaaaaaaatactctcacttgaaaatacaaaagtttcaatcattccgtttcctcctactctattcgtttgttcatgaattcactaattgcgctaaaaaaaatatttcctggttttcttccctgataagaacaaatgtaaaacttgttcatcaagttgtcttttaacttacatcatttttgaagcgctgtcaaaccttctcataggttgtgctcatctcggatacgagaaaatcttctaacattaatccatttcatacttttcgttatctacgggaaaaacaggatttattcgtatgttatctatagaagagtttttcccgcacgttctataataaaagcgagaaaagcctttcaatacgttgtcagaaaggcatgatacgatggaaaaatatttaccgacaaacgatttgttgtttaataagctactgacctctgaggattctccgcacattctgaaagccttcgtcaaagatttattaggactggaatttatgactctgaaaccaaaagttccttaccatattgatacgtacaagaaaaattatgatgaactgacgcttcgaatgaccgaagtggatatcttggccacggcagatgatggcagctgtacaacgattgaatgccagattcaaaagcataaatatttcaacgaacgcacgcttttttatctggcagaggcctattgctcaccctttggcaataccaaaaccgtggaatttatcgagaataataatttttctgcgctccgaccagtgtacggaatcaaggtcgttgattttgatttattcgatcgtgaaaaagcggcactgagaattttccgtctactagatgagcagacacacgaaccctttataggtcaagagaacagacaattgctgatgctctgcttccttagcttgaccaataagaatatcaaggaaaccagcgcagcctgccactggcagcattttctaaaaaccggcgaagtcacaccagatgctcccaactatcttaaagaagccaaacgtaaaatcgatttctattcgctaaaggaggatgaacagacgatgattatgaacatcaataaaaccgaagccatccgaaatgccgaactttcaactgcgagagatgaagggattgaacaaggacttagaaaagaaaaatgtaccattgctcggaaaatgctagcggcaaacctttcctttgaacaaatcgcagaattcactggtttgaagattgatgagatcaaaaaactgcgggatgagcaaaaataatctccgtcacagaaaacacaacgcaaaaaggcaggaacttcgaattcccgtctttttgcgttgtgctaatataataagctctgcattctttcttctattaaagaagctcttttaccatatctaataaagctttgacatcttctgctcgtgtatcgcccgtcacagaatcaataatcgaactgtaaacatgaggaataaccttttttaccccggcatctaaagcgattttaacgatctcttgaaaattctccaaatcgatcccgcctgttggttctaaatagaaatcattttctgcgcaggcttttgcaactgcctcgtattcttctttatgagcaaggcccttcattggaaaatatttcactgagcttccgcccatatcctttaataaagcgatggctgtctcaattggaacgatggcttcttctgtttgagagctcaaaggtccggtcgcgatattaacatagccgactttaccgcaaggagaaaccaatccattgatcactgtgtccgcttggtctaacaacgctcgggaggttccgacacctgtgaagacttgatttacatgctgtggctgcagcacgccagaaatccgcgaaaccatttggctttgatttggatcaccggcaccaagaccgacagataacgcattttctgttgcttcctgatagtctttcatcgcttcaatcgcggcttcatcgctgttataattttttgacagcactcctaaaacaacgtgtccttctgccgcttcgtaacagtcacgagcattttcgacagagttggctaagacgtttaaacaaacacgatcttgatagtaatttggggttaaagacatttaaatttgctccttcaatttataatatgttttgatatctctacatgatttcatttaatcgtgtaacgatctttcctagttcttcctcattgacagcgcggatatcaaattcgatgatgccattattggcttgatattctcgtgtatagatcgcaggattttctacttttagcgcgttaatcacttctgtcgccggtttattttggacttttacactggcccgataaatgtctctgccagcaccatcttgaacagttttggcttcgagtccttcaattttattaagctcttcaataaaaggcattagacgctgtttcatcgattcgcctgactcgctgccattttgtaaacgatcctccaaagcctgcgtgaagcctaaaatattgtccttgccgatcttcatagcccgaccgattcctttgccctgcagacgaacccattcaatatattttgctgtgccaatcaccaatccgctgctagggccttcaatcgctttggcgcctgaataaatgaccaaatccgctccggcttgagtatatttataaaggtcttcttccgccgccgcatcaacgatcaacggcacttgatgcttctttgctactgcagcagcatcagcgactgtcagcatacttttttgtactgtgtgatggctcttgatataaagtagtgctgcagtattgtcggtaatcatcatttctatttgttcggctgaacagccattggcatatcccgcctcaacaacttcaccgccgcctagctccaccattacttcaacaggagtaccataatcgacattgtgtcctttaggaacaataatctcacgttttttgatccgatcggtataagggtgataggcatgatacaaactgccttgtccaataatcgcagcgacagattgtgcgatgcctgctgatgcagaagatacgatctgcgcatcctcaacctttaaaagctttgccagataggcgccggtctgaataaataattcactcatctcaaagaaatgctctccaccaaagcgctgcgctgctaaaacattttctgatactttcgatacaccgaggatcgtcatttttcctgatgcattgataacttcctttaagccaaatttgtcataactaattgtcataaatggtgcctccaataatcgttttcactggtttgatcaattccttcgcagtacgcgtaaagccatttgaatcggtcaatgtcttttctccgttggacaaatcaaaaatcgttaaatcagcatcatacccagctgccaatttaccttttttctctaaatggaaatagtgtgccggtacatttgttaccttatctaaaatctcttcccacgaatatcctaccacacgcagcttttccattgttgttgccaaatcgtagacaggtccattttcgcgattgcgatgataaatgtcagtactaattgatgtggctttgatacctgcttttagcgcagtctctgcaacgtgaaagttaaaactgtccgtgccgtggcctatatcaaaaacgattcctttttcatatcctactttagcaaaatccttgatttgatctgtctccttgtccaaaatcccatttggtttgccgttaaagcaatgagtcaacacatcaccttcatccaatactgctaatatttcctgcagctctggcggcgctgacccgatatggatcattaatggcaggttttgatttttccgttgaatatcttttgctaattccaacggtgtaatcccattttcaccaataacggtcttactcattcgcgctttgattcctacgataaattgtggaagctcaaccaatcgatcatgtacaagatccgcctgaatcttcgtcaaatcggctagttcatcttgttcaacgataccccattttgaaatattaattagtgcgtaaacattggtcttgacctttttagccagttcataaaaatcaccaatattttctgcaccagtcgttccagcatcaatcacggttgtcacgcctttggttacgccgatttcatccggataatcataataaagcgtcattttttcataacaatgaacatgatcatcaatccaaccagcggatacataatgctctcctgctaaatcgattattttttcagcgggagattcaatcgtggtgtctacatttaagatcacaccatctttgattgctacttcgactttttccccattgatacgtttcccatttttgactaataaatcaaacatcctttggccttctttctactgcaatgcgactgggaagatcgtaccaagtaccatcgctccaagaatcgcaccgccagctataggttttttccaagcgtaaaatcctaatgctcccaatgttgcgccgatcccaatcggaattgaagcaccacaagcactcaaaataatcagtggtcctaagaaacgtcctgaagaattaccagcacccatcatcacatcagcaccaaaggttgagttcgcctgattgatggtgaacttacgaatcaaaataatcacgccaccaactaataaccctaaaacagcacctgttatcagtgacaaggcaaagttatcgatcggtgcacgaatccccatactcaagaagatcgccggaattccgataccgatccccgttaaaatagatccgcctaaatccagaatccctaccaaagaaccttccagaatacgtgcaaatagaaagcttgcaccaaatgccgccgctgctccatatgagccgccatctaatcctgccttcaacatcgcaacaattgacacttcattaaaagctcctactccgtgtacgacatacatatgagtcccagcaaaaaccgccgctgccatgattcctacggtgatcggaaatgcccaatccgcataccagaagcttttcgcttttttctcttcagaaagcattgcttgttccctttccaattcctctgtgttatccatgtatttccctcctaattaatgaattacttttccgtaaaaaatatgattctcttcacatgtttcaatctatcttctactcttttcaacaattttttaactaactcaaaattcaaaaataccttaactcaacccaagcattttatggatattttctaaccaatttggtgcttgtagtttgaagctttccaagacttgtaaatcgaacccgcggaagaaaccactcaagacaaatagcaagatgattgcacccatcatcatcttcgttacttttgaccagccgatttcatcgacgcctttaccgatcaggatacctaataccacgccaggaacggcattccccataatcaattgtgcaataccgccaaataacgtgccccagaaacccgtacgttttcctgcatctagtgcagctaaccagaaaatgactggcataacaacattaatcaaggtggtggccgctgggaccaatacggctacagctgttacctgcaaagcttctggaatagctgcggcagttgaattcaaaaatgcaacaacaagtgctccgacaacagcaccaacaaagcccattttcctaggatcatgcatcgtttctgaaacatttttatttttcgctaataagaccgaagctgcccaattgggaataatccgatgcgtaacatcctgtgtaaatgcgcctgctccaacagtcgaagcccaagcgttgaagaaaaagcctagtccaaatgagaaatgcgatgctggatctcccatacacgcgttcatttctcctaatgtacgaaaggctcccaagccctgcgtacttggagcatgaaacatccgcgctgctcccattgaagctgaaaacccaagcaagccgccaatgataattgatttaattaagataactgtaaactccacttctttacttcctttctatttttccttatatttttttggaaataacaggaatttgaataccatcaggatcatctgtcatttccttggtaaattctacttcaccaacttgaagcgttgttacactgaccgttacttccaattccacatgatagctcgttctttttcttggaaagaagaaaaagagaaagcgttccttatacgtcttttcgatcgctttaatcacttctacttcaatcggttcaattcgtaaaatcacttctgattcctgcatcatcttcttttggatttgacccagcgcactagcaaacgcgtgctgcttagaatccccttcgccttcgactgtcacgatgacttgttggcaatcttgaatactcatttactcatctcctaattgtgtttcttttcaaaggcttctactagacgtttgcctaattcttcttgatccataaagccgaagcctaagacagtttttccgtcattaatcgccgtgactccttcttcgattgaacgcatgccatgacgttctggatagccatattttgttgaggcagtcaatgctcctgcgccaccgctgccgcaaaatgaaatacccatatccgcattttcctgctgcatcacatcgcctaaacgcatatctgcgcccattcctggaacaacgactgctcgtgcgcctgctgcttctaccccttttgctacgttttgtcctttgcccatacggtctgcaattactactgtgatcatttatatttcctcctaaagttcattttgtttggctgtttcaaaatggatcgataaaacatacatctcatcttgagacaaattatcgatttttcttacaacgccgtctgctaactgcaatgcttcttttgatacttcactgaacatttccgggtcaacctctggaattgtttcctgttcctttgaacgctttaacatttcattcaaatgattgattaaaattgtccattgcagctcagtaggttcaattttcactaatgtaagttctttttttaaccaatcaatcaattcttctaattcttgttgatattcgctggttgatataatttgtaacgcttctccagtcacggtcattcatttcctcctttgatatacgcaaatagtgctgtgatttctgattgattaatcgctaagttgtgttcggcaaacagctcctcgatctgtttgttgtatgatgtagaagtcggtaacacttcatccactttgtttccttccatcatatattgctgatcaaaggtaattcgatggaccattagaaagacatgcaataagaacgcttcacgatactcttggtttagctgctcttggaataggagcaatagcttttcgtaaattgtgtatgcctgtaaaatcaattccttactgaaatcttctaatgacgttcgatttcctgccggctcccatctcacttttctgacaccgtgttgcggtgtttggctcaggatttttttgactgcttgttgaatcttttccaaatcctgcttcgtcggtaacgggtgcactttgataaactcgcaatctattccttcaattggaaaaatgctgatgactaattcaggctctttttgcttaatgacttcctttgcattcagcaccgaagcaaacgctgcgatttcgatattcgaaagctcttctgatattttctgcttaatcaaactcgttacgcctaagccagtagagcaaacatagaccgcccgaacactgcgcatgtcagccgccttttcataagatacgagaaagtgcaaggcgatataagcaataaacgaatcattgatcagcaagctttttcctcgaatctcacgtcgaacgaccatttcaatcgcatcgaacagctcaggatactttgccttgatgtcatccttgaacggattgtattcattgacgaatttttgtttacgagataatcgcatcgataaatgtgcatagagattattcagtagctgtggatcattgaaaaaggaatagttgatctttttactcaccttctgaatcagattctcggtcaacaccatcacatcctgctgcagatcattttcgaaggtatcgctgtagatgtagcgatattcatcctcaaatagcggcagctggtaatgtgcaaagacctgttgcatcaataagtaagagagttcctgatgctcttttggatcattcagcaattgataacggccaatcgtatattcattttgcagtcgtattgtggcgatcgctactcgaatcaacatgttcagcagttccgcgtaatttaactccgccgtatcgatctgcttcaataactggcgcatgtccgcaagaacctgattaaaaacttcttgaaaagctgtgcctttggctgaataaagctcatagccttcctttttttcactctgtaaaagtaaatccataattttgtagatgtcataatcggttaagtccttttgcagtacttcttcaatcaacaatcgaacctgatgctcaggacctgtgatcaaaaaacctttgcgggacaaacgttcaagcgtcattccctgatcagttagacgtttttctaaaacctccaagtcgttaagaaccgtatccttgctgaccatcaaacgctccgccaattcaaaagaggtgattgcttgatttgtcagcatcaaaaaaatacttaggcggtccagtcgcaaggtttgatcggcatacaattccagacggtcaacatccatcagctcacttttcagcttgattcgttcagaatcgcttagtgtcaaccaaacaccttggcttcttttacttgtcaaatcctgatttcgcgcctttagccacaaacgaatcgtgtccaaatcatattttattgtgcgcacgcttacattttgctgagcagccaattcctttgtagtcaccggttgcgaatcctcaagcaattgaagcaatacttggatctgtcgtttcgtaatctgctgcatgatgctctctccttacacgtttaactatagtcatttatttctcattcaacaatatgaaatgattgcacttactctagtgcaaaaaatccatattttataggatatagagtgccttcgagtaaaaaataaagtatagtaaagcaactttatcgttaataactgatatactcattgcactaaccacttcataaggtatcatcttttaccttaaaaatgtccgtttattcaaaatattttttttccataagaaaacctcaggagaaaaccgctcctgaggactttttgtttagataaatcattttattgtcgatcactgattctaaattcgtatccaagtacgttcttatagtattctggatacatctctccaccacatttttcgcaatcaaattgcggagcgttctcaggatcaaatgcaacatctcctgcatccaaaaattgaactacttcctttggaattttttcctttatcccacattcaagacaaatgtaatgaaccactccattggaatcgaagttttttaaaagctgcttctttttctttttcatacttacgtttcgatgcttcttccccaatttttttattctcctctcgcatgaatcgttccgattctttattcttcgcatatttcactacaagtcgtccatttttagacacactaactccactaaattcataatattcgccacatctagtacattccaatggatttactccgaattcttcggctattcgttcacaccatgattttggtttaagtgctttcttcacattcacaagcattcgttgaatctctttctggtaattacttaatacttttttcatgattgtcttgatccgccgactataaatgccgtatctacgaattgttttgaactggttctctggaatatgacgaatcagtgcaccaataaattcctctgccgacatcgtctttatcttatccgtgttagttcgtttatcatgatactgaaacatcactattttcccatcgtacaaaaggatacgatttaaagcaatgggaccacgtttcatataacgactgatatattctaatatctttttgagagaagttcggctccttttgggtgcatgcacgtaaaaaccctctgcatttttcgtgtacgccgcttgtaaaagcggctggactcgtgccttatcccattgggataaggttcttcgaatgagctttaggaccgcattctgccaatatttcctcaacattgcgaacggaaaatagtcatagtccttccattttccatccttcgtcagtccacccatggtgacgactaaatgaacatgcggattgtattctagctgagaaccgaaggtgtggagtgttgccacaaccccagcttgtatatggtgctttctaaaaaaatctaatagtatccgtgcagcttcatccattaatccttttaaaagctccttacgatacttctccttcagaaaaatctcacgtaaaccttcatcgatcgtgaagatgacgtgtcgatgcgtcactgtaaacagatcattcgccgcaacctctgcccaccgttgactttccccagttgcacaagttggacaaaatttccctttacaacgaaaagccactttctttacatcatggcatccttcacagacaaatagacgataaccttttttaaggtcaccacaatcgcgaaacttcttcacttctcttttcacaacggatcgaatccttcttgtgtacctttgattgaatttctcccagttttgatattcatcaaagaaaatggcgtgtaaaatattgggtttcatatctccagtttaataggaaaaagaccagatgaaaagcggtcaaaagattgatgtatcaatcctttgaccgcttaaaatgttatacttcctttaatgttgaaaaaaactgctgaggaatattcctcaacagttttaccaatctgaacttgcgccaccaccgccagaactgccgccgccaaatgaatctccgccgctagaagagcttccactgccgtatctgtcactactggagctgccctcattccacaaatctttatggtgataatagacggagtagcgtttcatctctttctttttcttcgtaaataaatccatgaacttcaaagtaccaaaggcgtaacaaaaatggtaatatagcggctttttatttttcaaccgcttatagcgttttacgattttttctctagcgatcactacttccggctctttactgtgaatcatttttctaaccgaatagcgttgaaatctcggatcttccttcactaaatccttcttcagctcagcggaaaattctctgcgagctttccaataaatgtaaagcttcaccaatggcgtctctaaaaaagcatagaggatcattatcacgaccagggctggaaatacataattgcggataatttcccaagcacttttacctgcaaaatgtttttcaaagaaccctggttcaaaatccttgatcgtttttcttcctattaaaatgtgatcaatattacctgtaacgattttgatcccttcatcataattttccccgcgaaaatagtcctttgcttcttccgtcataagttccatcgccaaggcatcagggatatcctcttccagaccgtagcctacttcaatccgttgtttacgatcctttaccgcaatcacatacatgattccagaatcatactctttatccccaactcccagttgattgaacttctcattggcaaagctctcgatcgactgatcagctggcagttgtttcaaagttaccacggctagctgaggacgcagctctaattctttatatttttgattgtatgatagatttgttctttcgtttcggaggacaggacgtttgcatgatcctccacatagatattctctgcttggactgtgccgcaccagaataatcctattagtaccaacgaaagaaaataaagtacccgcttcattttctcacccactttacttttcctcaattatggcggttcttcgcttaccgtgcaatcactttttccttactttgattgcttatgaatgaaaagaccctacttgcaaaaaatctttttttctatattctttcgcttttttgggtaaatagtttcagaaatatgcgaaaaaagcatttacaatgtaattgttttctgtttataattattttaaataaaagaagatcaatactagctttttcagattttcttttatcaattacgagaatattttctcactattaaacaggagggtacatctatgtcattaatcggaaaacaagttgaagcgtttcaagcgcaagcctatcgtcaaggaaaatttatcgaggtttctgaagaagtcttacagggcaaatggtccgttgtttgtttttatccagcagattttacttttgtttgtccaacagaattagaggatttacaagaccaatatgaaaaattacaagagttaggtgttgaggtgtattcttgctcaacagatactcatttcacgcacaaagcatggcacgatacatctgatgcgatcggcaagattaactacaccatgatcggcgatccttctcatcatatctcacgtatctttgatgttttagatgaagaagcaggtttggcacagcgtggtacctttatcattgacccagacggtgttgtccaagcaatggaaatcaatgctgacggaattggccgtgatgccagcagcttgatcgacaaaattcgcgcagcgcaatacgttcgcactcatccaggtgaagtttgtcctgctaaatggaaagaagacggtgaaacgctgaaaccaagctttgacttagtcggcaagatttaaggtgtttctatgttagataatgaaacgaaggaacaactaaaacaatatttagccttattagaatcaaagatcgttttttcagcaagtttggatgaatctgaagagtcgaaaaaagtagaagatttcttgactgaagtcgcggcgatggatgataagattttgatcgaaaccaagaacttaaaacggacaccaagctttgagattaatcaggtgggcgcagatgctagcggcatcgtctttgccggcttaccaatgggacacgaatttacttcctttatcctagctttgctgcaagtcagcggtcgtgcaccgaagatcgatgattcgctgatccaacaaatcaaatcgattgatcgggagttagcatttgaaacctatgtcagcctaacctgtcataactgcccggatgtcgtccaagcgttgaacattatgtctgtgttgaatccaaagatttcgcacaccatgatcgaaggcgggatgtaccaagccgaagttgatgaaaaggaagtcatggccgtaccgactgtttttctaaacgatgaagaatttgatagcggtcggatgacgatcgaacagattatcgaaaaagtcagcggacctttgggcgcggatgaattcgacgataaagaaacctttgatgttttagtcatcgggggcggtcctgctggtgccagctcagcaatttatgctgctcgtaaaggaatcaagaccggaatggtcgtggataccttcggcggtcaagtcttagaaacgctgggaatcgaaaatgtgatcggcacgccttacgtggaaggtccgcaattaatgcgtaaagtggaagaacacgtgaaacaatatgatgtagatatcatgaaaggacaacgtgccaaatccattcagaagaaggatttgatcgaagttgaattagaaaacggtgcgcacttaacgacgaaaacggcgattctttcaaccggtgcccgttggcgtgccatcaatgttcctggtgaaaaggaatttaagaacaaaggcatcgcttattgtccgcattgcgatggcccattgttcaaagataaagaagttgtggtgattggtggcggaaactcagggattgaagccgccattgacttagctggattagcgaaacatatttatgtactggaatttcttcctgaactaaaggccgatcaagtgttgcaagaaaagctttactcgttgtcgaatgtcacggtaattacaaatgcagcaacgaaggagatcaccggttcttctcacgttgaagcattgacgtatacggatcgtctaacaaatgaagaacataccttgaatgttgaaggggtcttcatcttgattggtctaatgccgaacactgagtggttagccgatacagtcgccttgagcgatcgtggcgaaattctagtagacaaacatggcgcaaccaatgtagaagggatttttgccgcaggtgattgtacagacagcgcctataagcaaatcattatatccatgggatctggagccaccgccgctcttggcgcctttgaccatttgattcgtcaaacagttggcacataggataggaaacattttatctgaaaaatagctcttgtcttcgtgcgcatacgattaagctaaactgcttaagcattttttggtaaataagcaatgtttatgtttcaagcttaattaactgcgaaaaatctaactcgcagctacctcaattgaatagtaatcatttttccaaaagcgcgaaaaatgattttattctcgtacgcatacgattaagctaaactgcttgtccatcattttgctaaaaagttctgtctacatttcacaccgaataaactgcgaaagcttaactcgcaaaataatccccagcctgttcctaccaacaaaaaagaacgggatggggatttatctataattatgtctttatacaagactttctttttgcaaatccatataaagcaagactctagccattttcttcgaagtcactctgcgaacttctctcggaataaactgatggatctcatcttcgttgtaaccgacttggaatttcgtttcatcaaaaacaagcggacgtctcaacaagcttggatatttttcgatgatatcgaccaattcgcttagagatagctcatcgaaatcaacgtctaatttttcatagacctttgaacgcgtggaaataatttcatctgttcctgtttcggtcatcgtaagaatttctttgatttcatcctttgtcaaaggattcgacattatatttctttcttcaaatgccaatccattttctcttaaccatgctttggctttcctacatgatgtacaactagctgacgtatacaatttaatcattttacattcacccttctgtttttcaatttaagttattaagtaacacgagtcattctacacatattacgatacaagatttttaaactaatgttaaatatttcatttgctaaaatattgaaaaaggctacttcagcgaacgataaagtttcttattataactaaatttgatacatattctccataaggtatacatgataagatagaatgattctaagcaatacaggcataatgagtattcctgtatagaaaatatacataactagtgtaatgttttactaaagtgattactcaataatttctttgtcaatccaaaagatgattgtgaattataaagttctgatttttattattattatgacgattttctgatttaataatagtaatactaatgatatctgtattttctaatggataatctgtatcactatttacagcagatttatcaaccaactattcttcgtaaacacctttttttactcttcaacctcatttcatcctataagtctaaaactacccttcttaccttttctccataaacatatgcagatcgcgtttttctttgtagacataaagcaattttatacacgtgtttccagggtctgtcagtcagcttagtcgattttttatacttttgatttaacagtttctgctaaagtaacttgtagtttaataatgaaggcttttgacacggttgataaattgtccatggatctctttaaatagctgattacgcaaaaaaagcaccgtctgaaatcctatgatctcaaacggtgcttcacttgtcttaactaataacggtcacagttactgaacgacgtccccattggatacattgttcaactgttggaaaatggacatcaataatattccctttgatggcaccaccggtatcaccggcgattgcaattccatagccagatacttctaccattgaacctaatggaatgacacttggatcaacagctacaacctgtggattttgacgtaagtcgattcccatcgctgtaaagaatgtattcactgactctgcacatgaataacccgttgattccatttgcatcgtacgaccagatgtcgtcggtgtgcttggtgctggttgcgctggttcttgttttggttgttcgcttgtttgtgttgtttgttgtgaacttgacgctgatgaagctggttttgacgattgtgaagatgcttgcgatgacgcttcagccttcgccttttcttgtgcctgtgctgccgcagcttttgaagctttttcggcttccgccgcttttgcagcctcggctgctttggcttctttctccgctttttccgcttgtgctttttcagcagcttggcgggccttttctacttctttgtcttggctgattttttctaagctagttttattatcggctaactcttgctttaagttggccattttttcatctaacttcgtcgtttcagcttccagactttgactattttgttttaattgggcttgtgttttttcctgtgttgcttttaattcggttaatttgtctttggcctcgcctagactagcaacttttgttttctctgcattttggataacggtcatcgcaaaggcacgattcaaaaactcgccaagatcctttgattccaataatgcattaatcgaacgatccgtcataccattgacttgagcagttttcatccgctctgcaattgcttctttacgctgttcaatcttcttttctgtttccacgatatctgttttggtcttttccaaaactgcttcattctcactgatttttgtccgaatatcgttaacttcttgatatttttcgttgacatcattcagtgcgatctgtaattctccgctgattttatcactttgtcgagcgattgcggattcttttttatctaactcattcagtgactctgcctgtgcaaagactggtaaaagtacgttagcacccaacaatagcgtggcaacgaacccaaacgtttgctttctcacttaaaagtccacctttctatttaccctcagttattatacgagaaaatgacggactttttgtttcaccaacattacatttcattacaaaacgaaacatgttttagtaacatttgttttattttccctagacaccataaaaaagatagtcccttcaagctttgaaaggattaatttttgtcatatttttgtaatattattttttccgcagctctttagataactggcgaatctccgctaaaggactttttatttccttcgatttcatatttgggaagctattcaagaagcggcgttcttggaaattcagccttggcagttgtttacgccactcaggctgttctttgatttcagccatccaaccctggcgacgttcttctgctgctacctttaattctccaagatctgcttgcagctgttctttcttgtcttggatcgtagcactcatcttgtttatcgcctgacgcaatgatgcaaggttcgctagggtaaaacctagatcaaaacttgttagcattaatagaagcattggtagaaaaattccaaagcgctgctgccagctgctaacaacagtcattaaataaggatttaagacgcgaacaataaacacacaggcaatgccccaaaagatggagactggtacggccacccgtccattgatattcaatggaacatccttataatcccataatgtcagatgaaaaattttctctaataaaaagctggtcagatattccaaggcggtcacgagaatcagcgctaagaaaaacaggagcacgatattctgctgatagggttcaataaaataaagcacgccaacgactccaaagccgtagattggtgtgattggtcctaatagaaagccgcgatacacgaaatgtttcgccttgatcgagcaataaatcgtctcccataaccaaccaataaatgaatagcaaaaaaataagagcacaatgatcgtaaatattttttccattttcttcctccattaaacgaatgcttggctttcattattccacggatagtcagaaaatgctagtttcatgggtaaagcttccactatgtgccttgtgcttaactttagaaagcgtcttgcctttccaacttttaactattctagtaaatgaatcacattgataataggcaaaagatcgcttgcagattttgttcattatccattcagtcttaaaccaaatgacgctgctaaggtctaaacttagagcagctacttgtataaagctgtgttcaatatgctaaaaacacttatttttaagagtatttacaattaacgcttgtttttaacgctttctccctatatcatttttatatagaaaacgttttaatcacagtggtattgttaccgtattcgtatctttatttcgatcatcatcactttcaactgtcaaaaattgtaaatttattattttcgcaaaaaaaggattgtacttagcttgtagtttctaattgtttaagaacttgctcaaaaaaaggagggaacgacgatggattttcgcacaactttaggaaccagcaataaacgtcgtttgttgttattggagcatttatactaccggcgagatggtctatccagtgatcaattattaagcctgttaaattgttccctgccgatcctattgaacgatatcgatttgatcaattctgaaaaaccaaatgtcgtccaaatagtcaaagtgaagggcttgtttcgaattatcatggataaatcgatcagccttggtgtcatctatgcggattttttaaatgcttgtcctgaatttcaaattatcgaagagcttctgtatgaagaatgcgaaaatattactgcactatcaaaaaaactatatttaagctcctctaatacccaacgctacctaaaaaaaatcgaaactaccttgaccaaagcagggatgcagcttcactatcgtcccctgcgaatagaaggaaacgaaggtgagattcgaaatttctattatcgtttttacacagaacgacaaagcgcctttgaaagcactcttcctaaattgccgcccgatcattactacatcatcgaaaaatacgttcaagaatttattgatatgaattgtattcatgagaaatatgtgtacgagaaacgcctgatttacaatatgtacattagtttttggcgactaaaaagaggtcataggttccctaaggaagaattaaggacaaatgccattcttcttccaacaggactcgcctacaaaaaattaaagcaggcacttagagaaggtgtcggcttggaactaacaatcgagatggttcgagacgcactttggttaaccttttctgacgctattgtcttcagcctactgcatcgagatgtcgctctgatagaaaatccaagatatcgccggttatttacacagcactatgctttagcgaaagaatttgatgaaatgctgggaaatcgtctcagcaacttgaatcgattagacatagcgacggttttatgcaatgatttttacttatgcgatccaaatggaaagtacattggcgtattatggcgcaatcgttctgtattcgtacaagaagcatcaaaggtctatcgtcgaggggttcaaaagattcgggaattagtagaacggtttgtctcaagacacaacatgtatcaagaagaggattttattcaaaattatatgtatttgttgattacaaccgaagtgtatagtatggaatggctcgccagtcaagatcagccactaaaagttctgttactgtccgatttatctccaacagaagagacctttttagcaaagcagatttccgaaaaggtctatggcaacttcacgatcacacatttcgaaaaattatcaggcggcttgcctaacctaaaagaggaattaaaaaattatgattgcctaatcacaacaggttcttccgaaggactaccaaaagattatccagtcgtcgtgattgatccgtttattactaatcaaagcaggaatttcattcaagaaacaatcagtgagctatccaaaaatagagaagacaaaaaagagtgaaggaaattctatcactctttttctttgactcgttttctacttggcagacaagttttctggtatttccaagtatattcttcggacttgattgacaagtaagttacaatagaagcgatcctattttgcagattatttactttatctattggaggaacttatatgcttcagcttttacgttatgccaaagattatcgaaagcagattattcttggcccttttttcaaatttttagaggctgtcttcgaactgattctgcccttattcatggctcgattagtagatgaaggcatcgctcgccacgatcaaggcaaagtgattgagatgactgtcgctatgctgggcttgtcaatcgtcggattgctctgtgcgttgatctgtcagtattatgcttcgattgcctctcagggcttcggtacggttctgcgaaatcgcttgatggagaaaatcaacagcttctcccataaggaattgaatcgctttgggacagataccttaatcacacgcatgaccagtgacatcaatcagatgcaaggggctctagcgatgctgatccgcttagtcgttcgagcaccgtttctaagtattggttcggtcattatggctttttatatcgattggcaaatgggattgattttcttgattctgctgccgcttttctgtttcattctctttttgattatccattattctgtacccttatatagaaaaattcaacaaaaactcgatcagttaaatcaattggtgacccaaaatttgagcggcgtccgagtgattcgcgcttttgcccgaacaaataccgaaacggctcactttaatgaagaaacagaagaaatctcccgcttaaatcagcgggtcgctaacatctctgccctgctttctcctagtacgacactgattatgaatgcgggtgtcgtggcgctgctttattttggcggctttaaagtcaatgttggacatttagaacaaggtcaggtacttgccctgatcaattacatgaaccaaatgcttttagcgttgatcgtcgtttctaacctagttgtactgttcactcgtgcagcggcctctgcgaatcggattaatgaagtttttgcgactgacacgaccttagaagatgatggcgcggttcaaaatgctaacgaacaagcaccattaattgattttgagcatgtcgattttcgctatacagaaaaatctggtctggctttacaggacgtctccttcactttgcaggaaaataaaattctcggtattactggcgctaccggtagtggaaaatcaaccctgatcagtttgatcccacggttttacgatgcttcaaagggagcagtcagctttgccgggagcaatgtcaaagactggtcgttggatcatttacgttctgaaatcgcgattgtaccccaaactgctgtcctctttagtggaacgattcgggaaaatctgcaatggggaaaacaggatgccacagatgaagattgctgggaagccttagccatcgctcaggctagtgaatttgttgaaaccctgccaaagggcttggataccatgatcttggaaaatggaaagaatttttctggcggtcagcgtcaacgcttaacaattgcccgcgcgttgattcgcaaaccaaaattgttgatcttagatgattccttatctgcgttggattatcagactgacctagatttgcgccaagcactgaaacgcgagcttgattgtggtgtagtcattatttctcagcgtttgcgctcaatccaagacgcggaaacaattcttttgatggataacggaaaaatcgcggctcaaggcagtcatgaagagctattgcaagaatctgagctgtatcaggaactggtcaattctcaagcagaaggaggtgctgttcaatgatcaagaaaaagaattttttccgttcattgaaattgttcattccttatttagcggcttattcaaaggaattgtttgcagcaattattttaggaatcgctagtgggatcacctctgtgttgatgacctattatattggtgtcgctgtcgatcaaatggtcaatcaaggctccgttgactttacccgactctttcagattcttcaattatttgtcggcatctttttagtaacggttatcagtcaatattttattcagcgattaggaaacacggttgcctttgattcagtggctaaactgcgggaagaaacctttactcatatgaataaactgccgctgagttattacgatcaaagctcaaaaggcgatattgtcagccgctttaccaatgatatggataatatctctactgctatctccgcggtcttcaatcaggtattctctggcatgaccgttgttctagtcgccttagtttttatgctttatcttagtccaatgctgacgttcgttgtactggtggtaacgccgatcatctttttgattacctatatcgtcgctcgcacctcgcagcaatactttacaagtcagcagcaactagtcggttcaatctctggcttcattacagaaatggtcggcaatcaaaaaatcgtcaaagcgttccaacgagaaaaccaaaatcaaacaaactttgaagcgttgaatcaagagctttatgtacggggacaaaaagctcagtttgcttcttccttgaccaatccttcctcgcgttttgtcgatcatctagcctatttgatggttggcctggtgggtggtttattagcattaaaaactgatagcggggtgacaatcgggattatctccagcttcacgatctattccagccagtttacaaagccttttattgaattatctggaatcacgattcagattcaaactgcgatcgccggtcttgatcgctcgtttgaattattgaaggaacctgttgaacaagccgatgatcctgatgccttcaccttaactgccgcaaagggaaaggtcgttttcgagcatgttgatttcgcttatcaaaaggatcagccattgattgaagacttcaatttaactgtcgaaccgggagaaaccatcgcgatcgtcggaaaaaccggcgctggaaaatcaacactggttaatcttctaatgcgattttatgaagtagacaaaggaacgatcacgattgatggtacggatatccgtcatttaacccgagacagtcttcgccagcaattcggcatggtattgcaagaaacctggttgatggatagcagcttacgagccaatttgcgttacggccgtaagtcagcaacagatgaagaaatctatgcagcattgaaggatgcctatatgtatgatttcgtgatgcgcttgccggataaattagatacgattgtaggcgatgctggtgttaagctttccgatgggcagcggcaattgctgacgatcgctcgaacgatgatcagtcaaccttccatgctaattcttgatgaagcgaccagttcagtggataccttgactgaacaaaaaatccaaagcgcctttttggcaatgatgaagaatcataccagctttgtgatcgcccatcgtctgtcaacaatccaaaatgctgatcagatcctcgtgctggatcacggacaaatcgttgaaattggcagtcatcaagagctgttggaaaaagatggtttttataagaagttgtatgaagcacagttttcacggagttaggtttatatttagatttcacttatctatcaagtagcgagacttaaagtacgaggttatatttacttcgtactttaagtctcgcatatttatctcttgaatttttcgcttatcattttaaatcgggattctcctattccttccaaaaatctatactatctttccactacctttacactgactgaatcggctacaactagacagaatttcttttcgtagtttcagagaaacgctcgataaatgcctccactttattaacatagattcataatattttagtactcattctgtttacgctctttgagttctccatcttttaactctatagaaaatattttattagaatcactccaaacaaaatattcatattgatgtttactatgtcttaataccatttctgaagttggatatcccaatttttttattatctcttctttagaataagtttgtccattcatcatttgattaaactcgtttaaaaatccaggaatactttcttcatgttttttagcaatatctaatgacttagctactacttttccatttctaaaggttatcatcactgaaactactggatcatcccaaggaaaataattccaggagtaagaagtcgctttttcccctgcattgtaatcttctatttttgagtctggttttccaagcaaatttttaacttcattttttttgctcccaccagatccagaatcttcttccccaacagttattttttcaaaagtatatttcaaagtagttaagctatcaatttttttatttacttttgatttagttagttctccatttttgatacttgaatgtgtggaagtcaccctcttgtcattttctccttgaagatcataatattggtaaaatagcgctacaaacgctaaacaaattagtattgttcccaatacaatcaataaattattaaaaactttcgaatttctctttctcactattgcctcctacactgaaacagttaatagatatcattgtctatataccaatatgaagattaatctctagccattgtagttaatagtatcatcaaatcacctatttctttttctattttaacttatttttcataaaatttattctttttttgatgttttttaacttttttcatttcaaaacaggtagattttataataaacttagtcacttagaaaaataaaaaagagcccttgcaaatttcatgtattattgaagctcctacacaatcaataaaggatgaattcgcaatgacgcaaattgagaataccataatttcacacacaaaggaaaacagctaacttatgaggaacgctgccaaatcgaagccttgaaagctcaagaacgtccgttatcaaaccgaaaaatcgtcaaacagctaggtcgtgcaccacagaccatccatatcgaagtgaagaatggtactgttcgtctaatttggctacagaaaaaaatggcatgcgttacgaatatgaaacgttcatctattccacctaggctggtcaagctgcctatgaaaaagcgcgttaggatagcactaagcaacctaaatggggcgctgcacctgattttatggcctacgccgaccaacagatgaaaagagaaaaaccatcctctgatgccgtggtaggacgagcaaaaactgaatctctttccacctgaaaagattccaagaaggacaactctctacaactatatttatcttggtttgatgactggtcgaaacgataagatgttcacccactggaatctcgaaaaaactctcataaatcatgtctgaggtattgactcaaatccacaagtgccacctagagaagattgtgcgaactaagttcagatacaatctattatttgttccagaaaatctaataagatgagatagaaggatttaagtctattgatttgtgtaaaaaatacaaagaaataggtaataaccctaaacatttcttgaaacacgaaccccccaaaaaatttataattcgattttggaatagcattttacttgattcctatctctaataattaagtaaatcaagacaatcttccactagtataaaaagatgtcaaccatcggcgaaaagaactaacaagactggtgtctctcacccacacaatcaatctcctatctcatcatctgatatttaacattaaacaacgtgaagaattgcttcttagccattttatgagaagccttaacccgccatttctgctcaatagactatgtttgtttaaaaatctcaccgaacaagtttatgtatattaatcttcacaaaatactacttaatttaaaatcgatcatagaatctttcgttaaaaataagtcgattttgcgacaattgatttaaataaaataaattgctcaaaaaacaaaagttattaattaaaaattgatcattatatccttaaaaaaagatttattatttacacacaacaaattataaaaggatttgaattatgaaaaataaattatatttacttatcaagagttctataatactaggatctgtattgagtctccctctccaagtcacagctgaaacaacgacatacagcagtgaatctgctatttcgaatttctctgaaccacccatgtctattagttcaacaaataacgtaagtttatcttcttcacaatctgaaacagctagttcaaacagcacgtcgaattcaactgaaagctccatggttcctttacaaactgaaacaagttcaacgccgagtatacctgaaacgcgtgctgcggacatcaatgcatggatacctgatcctgtcttacaagaaatcgtcgcaaaggcgatcggaaaaacaaaggaagcgttgactcaagaggatatgtccaagttaactagtttatatatccaaaacgcagacagtgccattgctagtttaaaaggtttagaactggctacgaatcttgattatttttatatgaattcaaacaatcaaatcagtgatttttctgtattagctggcttgccaaatttgaaacaagtttatttgatgggcacgaatgtcactgaccaaaatgtacctgatttcggtacgacgatcactcgcttagacctttctggaagcagtgtaactaacggtgtatacgacaaaattactaaaatgaccaatttagaatctttggtcttccaaagtaatatgaatatcacaacaattgaaccactcactgttttaaaaaaattgaatgaattgcgtgtccaattttgtggtattactgattttagaccgataaatcaaatgcctgctttgacgcaacttgctgcttttggccaaaataccggacggaatgatcctgcaacagacatcaatgctaaagacttaaattatgatgcagataaacaaacaatcgatattccattttcaattatgccaaatcgaatgactaactatgacggctatgttcccccattcactacgtcaaatagttctagtcagacctatcttgatttcaatggtgtacagctagacagcagtcgattgacaataacagatgagggcattactgtttccggggtgtcgcaggaagaattcgatcagctgcaaacctttgaatacaacgctcgtttgaataatccttctggaacatacaatcaacctgagcgctttactttctatgccatttcatcaggaacctatttgcatcaattcaatgttcaacacattatcgcatcacccggggtaacgatcaaatacgttgacgcggatggcgacaatatccatgctcctcaaacaatcgaaggaaacgttggtgaccaatacgatacaactacagcagattatcagttgattattcccggctatagcctcgatcaaacgagcatcccggaaaatgcaaaaggcagcttaactgccgacctgcaaaccgttacttatatctatcaacgaaacgtcgcggaattaaaggcgcatgactctacgatttatgttggtgaaagttggaaggcagaagataattttgacggcggaactgatcctcaaggaaatccaatcacctttgaagatgtttctgttgttggtgatgtcgataataccaaagttggtaaatatgagatcacttatacttacaatcgtgtgccaaataggatatggacgggcgatcatgctacagtaaaagctaccgttaccgtgattgacactgaaaaaaaagcccaaccagtcattgttaaatatgttgatccagctggtaaaataatccatgaagaaaaagttgtgaagggtgaattaggcacggacttcgatgtttccggcaaagagtatcaaccagcgattaagggatatgttttagatgaaaaataattgccgaaaaattcaaaaggaagttttagtgataaaacgcagatcgtcacctacgtttatcagccggaaacaaaaccgactacagaaacaagcgattcgagtacgtctggcaagccctcagccccaacaacgagcactgattccagcaaccaatccataacaggaaaaatttctgattcaaataataacgtgtctcctgctggatcatcgaccaatcttagtcaccaaactgtaactaccaaaaatacaagcacaaaattaccaaagactggtgaaactatcgtatcgaattatcttattgcgggtatttgtactctgttcctcgcgactgccttactgctttttagtcgaaaaaaaataaaatgataacgaagaagcatcctagcagatttagctaggatgcttcttgtatagctttcataaacactaatttctcaataagagagatcacataaaaaattctcttacgttgatttactcatgcttttcactttcgctcggcgataaaacactaaacataaaaggctaaagaatagcgtcaaaattcctgaaatcaaaaaccagcgtgcgattcccagcttttctgaaaaaggccctgccagtaataaaccaacaggcatggcggcggacatcacgctgccaaacaaagaaaaaacccgacccagtttttctggtgccactgtttcttgcaggtaagccataaagggaatattgtacagatttcccacgccgcccatcagaatacagaaaaagacaaacagccagtaaccgttttggtttgcaggcgctaagccgctgccgataaacgtaagggctaagccgacacatgacaactgtgctgctaataatttttcccgccattcctttttcattccaatcagaaatgcactgatcatcattccagccgcgtaagaaaactccaccatactagcaaaccaggcggataatccaaaatgaacatttgtcattaaaggaaatagtgtgcccaacggcaaatagaaaatcataatacaaaaggaaaagatcatgaccaccaacatcggcggatcttctctaaatacattgagtccatccttcagctcctgaaaataatgttgcggatgttcatcattgcgaacaatatttggtaccgccacaatccacaaggtgaaggaggcagccaatgcaccgatcaagtccgttagtagaatcagccacaagggcatcaccgcgaacattgcagctcctaaaaccggccccagcataaacgccccagattgtaaaaattggttccagctgttggctttgaccagttcctcttctggaaccagcaatggtacaatcgcttggatcgagggtgtgtgaaagacatttgccaatgcccgcaagaacaacgccacgatcactacagcaaagcccggtcgtcccaataagaaccacatagacagcacgaatgcaacaagccccataaataaatcagcaaaaatcaccacatattttcgttttagccgatccagccagacaccgacaaaaggacctaagaacatttgaggtaaataggcgaaaagtcctgctaaagacaacatgatcgctgattttgattcgttggtcagccaccaaatcaatgaaaactgaacggccgagcttccgatcaaggaaactgtctgtccagataaaattgttaaatacttctttctccattgttgtttttccatcattgctcctttgtttgtcgtttgaacaaacaaaaagttcgtcaaacgttaattatttggcgaatcggttaattttcaaacgcatcgaagcacacataagaattcctccttttctattttacttgattaaacctaattcaactttccatgtcaacagccgttccaccgattgattgagctgctcttcactatattgaccatttttgatcgcctctaggatataaggaatctggctgctgtagcttgaggataaaatcatatcatttcccgcctgcaaagcctgcaatccggcttcttcttgagagataaaatcagcaagtccagccatatccatatcgtctgtcataatcacacccttgaagcctaattcattgcgaatcaagtcatgcactggttttgaaattgaagctggccgctgaccgtcaattgcagaaacgatattgtgggagaccataatactatcaacacctgccttgattcctgcttcaaaggggagaaaatcatttcttcgcagttcatccagcgaacgattatcggttacaatttctacatgggaatcgcgattattcccataaccgggaaaatgtttgatagttgaacccagcttttgctttttcatttcttctacgcttaatttgacatagtgactggtaccagctgcatccatcccaatcgtccgatcatagataaaggattgcggatctgttgagacatccgcatcaggaaacatccctagttgaattcctaattcaccaaagacctgtgctttacgatcaatatcttgtttgattccatcccagccatttttttgatacagcgcttgaggactttgaaaaggcggcgaaacgatttgatttctgctcaaacgactcaccgtaccgccttcttcatcggacccaataaacattggcgttttgctggcctcttgataacttgtgatcgcctgcttcacttctgcttgcccttttccttccatgtcacggtcaaaaagcaaataaccgcctaaatgataattttggatatcggctacctgattttgctctggtacacgagccataaataattgcccgactttttcttccaaggtcatggcattcattgttttatcaacagtttctttcattgtcgactcctttttctgggattcagacgtctgctctgtttgctttacggactcacttggttttgttgagtcactagttattgaagactctttcttagaatttccacacgcagtcaaactcaggaccgctgataggatcatcaaactcagtacaacgctttttttcacttggatacactccttatatgaagggtgatctaataaattagattgtcttcactaatatatgccttccgtttaactctgtatgcttattgtaaatattctattattttttcacatttataaaaaggcggattataaatatcagaacggatattttttaatatttacgatattattctagcacagcttgcgaaaagaaagcatcatttcaaatttttctataaaaaatgctgagaaaagaagatatcttcttttctcagcattgctttacttgtatgaaattgcagcacttttacgaaaacgatagcctttgccccaaatcgtttgaataatctcgtgatcaacctccataatttccagcttcagcttgatattctttactaaagaagagagctgggctaaacgcgattgggaaatatgtccccacaagctcttacacaactcatcgcgcgagatgatctctcctgggttactccgtaatttttctaaaagctgcagctctaatgacgataaattaactagcgtcatcgctgaaagatccagatcttcttcgactacttcctgacgcttttccgttaccacaggttcaaaggatttattctgatattgtgtagcaacttcggctaattgttctctcaacagctctaccgaatcactattttgtacgatcccatttattccttgtacttctaacaatgaacgttccttctcgctgagggaatgatcaacttctctcagtatgttttgaccattttcccgtagtttcggtaacatcaattccatctcgtagcttgaaatggtctcaccgatgatgataatcggaaaatgattgactaaattcgaaacgcgtccttccatctgaatctcattgagaatactggtggaacaaaacacttcataatttaaatgctgcaatttatttgttaaagcttcttctgctaatacattttttgttaaaactaagattcgaaccattctcataccctcattttctactcataatactcatgaatagaatataacttaaatttaagtaaataaaagttctttttttagaggataataaacaaaatattgaacattataaattatatcgtttttttgaggccttaataaagaaaaaccgtgatttattatcacggttaagcagctaccttatttaattcttttgtatgtttcacagctttctcaaaaattggtaagttgaattgtttatacaacgcacctgccacgaagtaagcaatgttgaaatcaactaagctatgaactaaaccaccaactcccatcagaataaagacggtatagatatatccttgtgaatagaaggtgtctggcatatttcccataaagtaaaaggctgagacgacaatcatttcagcaatcgcgtggatcagaccgatgactaggttaaatacttgaaaacgcccatttgctagtgtgaattttccattttttagcacaagctcaggatgtttttgtagataataagcaccaagcagtgcaaaaatcaaatgtgaaaaggctcgtaaagcaataatcggcgtagtagaaataaaaaagccgaatgtagttcctaaaacaaccgcgatcgccactagcggtgagaagaacatcgcaataaacacgggaacatgactggctaacgtaaatgacgctggtccaatcacaattttcggcataaccatcggaatcaagatcccaagtccgatcagtaacgctgaaatcgtcaaatttctaatagaatgatttttcattttttcctccttgatatgtcaagacacttaattgagtttcagtttagtccaaaaccactcaggtgtcaagacagttggagtgagaattttatgaaaaatttcattattgatcaattcgtgctaaatgttcatcccgttgctttagcgtcatatgatgttttttcaaatatcgattattaggatgtttggcgcaggcaatcgaacaagcccctaagtatttttcttcattttcttcagaaacaagtatttgccgattacactctggattactacaattgatataccgttcgcaaggagtaccgtcaaaccattctttgccgatcacctgtttgtcgacttggttaatttccacactgatccgttcatcaaagacgtacatttttccatcccataactcgcctctggtagtttcgtttttaccataagccgcaatcccaccgtgaagctgcgccacatcttcaaagccttcccggattaaccagccagagaatttctcacagcgaataccgccagtacaataagtaacgatttttttgtccatgaactgttccttattctcgcgaatccacgcagggagctcacgaaagttatgaatttctggacgaatcgccccgcgaaagtgccccaggtcatattcataatcatttcgagcatcaatgaccaccgtgtcttcgtctaatagagcctcacgaaatgcttgaggctctaaataatttccagtcaattgccgcggatcaatgtcttcttccaaatgcaacgctactaattcctttcgaggacggacaaataatttcttaaacgcatgcccctcactttcatccatcttgaaataagtatctttgaagcgttcatctgccagcatgacatccatatagcgatccgtagcttccttcgttcctgaaagagtgccattgatcccctctggtgccaccaaaatccggcccttaatatctaaatcacgacaaaaagccaaatgctctttagcaaacgcttcggggtctttgattgttgtgtaattatagtaaagtaatacgcgataatccatgatgattcctcctgtttctttatcctttactactataggagatagaccctgttttttcgagcttgatgcttgtggattctttctcaagtttgggtgtaataaaaaattagtggtacattcgacacttgttgaaaacaagatcaaatgtaccaccaatctgtgctataaccatctctcgagaaaaaattgcttgtgattgcaggagctattttacctttttctttctataccttcctaaaatacactggagattattctaagttctgataaatcaacgtgtcctaacgctgctaatcaaaccttatcactcgttgtttctattgatttatcagtacttaaaatagctgcattagcaagacacccaatccctaatactacaaaactttttttcttaaacactacccctgataataagaaatagcttcctaaaattttatttgtacgagcaatcgattcttttgtttttctgtctggtcgaggaagctttacactcacacctaatctttcaccaaacgcttcaaaaaaatctgctgatttatttatcatctttctgctcctcctttttactgcaacgacagccattgttgacataaacaatccaaaacaactttctaaagcctttctaacctgaagcctctacaaataattctccaatcaatttatccgtcataaaatcaaaaacagtaaaaaagtcgcaaactggttcgatagtttttttcgtagcgatagaagacagcaaggtactcagtacaccaaaagcagtcgcatcatcaataacaggttgcaaattaacaatctggcaaacctctttgaaaaaagacatactttcaaatttgattgtttctatttcctccgttgataactttgtaacaaacgcacgaaaatcaactgagtttacatcataaagaaatgggttatgatcaaactcacgtgctagtttttttaatgcctttgataaccccatacgattaggtgtctggaggacagtctccttaaatcgttccgtcaaacgtgactggattgtttgcgctgtttctaaaaatagctgttcttttgtagcaaacaacacataaaacgtaccaatagaaatctttgcctcactacaaagggctttaatgctcgtctttttatagccctgagcaatccaaaaatcctcacacagttgaagcagcttctgtttgattactaatttatcttctggacttaatactggtttattaggcatgatcgaattcctttctaactatacgaatatttatataattatattcgtaaaaagaatagcatgatcccttgatcctgtcaatctacacttctgcctacatatcttttaatgataaacacctggtctgaaatcaaaagctggatcatgcgtctttatttatcctcattaaatggatagtctgtcttaatttactactttagatttctggaaaacagaaaaaaatcaggttctcctctcatcgtctgaaagtgaaacctgatttatctataatctgatcctgcttaaaaatcgtctatttgcgtcgtcctaagaaaaacgaaacaatcagtactaaaatcacagcaccaataattgatggtactaaggccatgcccgccaacgatggtccccaagaaccaagtaacgcttgacctagtgctgaaccaactaaacctgcaacgatattagcaatccagcccatactatttcctctacctgtaatcgctccagcgattgcaccaatcactgcgccaataattaatgaccataataaacccataataaatttctcctcacttctatattctctcttgttttatcaaaagtttttctcactgttgtattttaatttgttttcgtttgtttcttctttaagataataggaatcaaaaacagcagcgttggaataactactttttttgctaatttagccatttttgcacctcctaaaacaactaatattttaagtcttttaactaaagaaataattcttcagtttcatattgtaatccaatactccatctgaattttctaaaatgaagctgttcaattcattgcagtaatccaattcaatctctgtgcctaagttagcttgatcctcagtagaaataaagacttgaaattcctcgttttctaccgattgattgtattgctggctttttccataaataggaacgatttggaaatagctaccctttgcgcagcagcctttatctcttaattcttgattttcttctgttctggaggccaatataaacgcatgattctcccccagctgacggcataaaacatcctttgcttcagtacttactagcatttccataggtatcctcctcgataaatttcttatttttcaaattctgtcattcgtgaatatttaatataaagctttccagctgtgacattcttcttctttttgttccacggcttaatgtgtccagtaaaatgaataatcgctggctgttgtcgtgtctcctcgtattcttcttcgccttttttccgaggatttacgatttcacgtttcaaaatatagctttgggcattccatcttgaatgcagcggaacccagcaatcgtgcaagatcgcattcaatgcatcctgatcatggaaacgtaatttctcaggattttcttcaataaattgaaagactctctcggtaacattttcctccagccatttttttacgttaatcagcatcaaaccagaattgaagtaacgatttgattttgttttaatccccatcttctctaatcgctggtgaaatcctgcgtcttctacggcagctagaatatgatcctgcaggtctgtttcccatagtttagtaatgtccgtaagagcgatcatatcgcaatccatatataaaactttctcaacattcttgtctcggaatagttctggaatttcaattctgaagtaggcagtcgccggaatgcgatcgctagttacgacatttttgaaaattgctttgtcaatcgttaagaacgtcaaagacccaaaattttcgaaattctctaaggtttcacgcagagtttctttacaatcatcttcgattgaatcgtcaacgatataaaaatcaaacgtatattcacgatcctcgcaattatctaaaatagatacccataaagcagctagatggggaacaaattgtgtgttgcagctggcaactaaatgcatctttttctcttcctgtttattcattgctaacacctacttcataagatttatcttcagtaaagatttgcatatattgctcttgataaggatgattctctaacgtattccatggtttatcatgccctgtaaaatgtacaattgccggtttatttctacctgattgatacaaatgatcataatacttcgttggagccggatggacatcaaacatcaatgaggtttgcatattccatttaggatgcaattgcttccagttatcatgcaaaatagcattcaacgcgtcttgatcgtggaacacaatgagctgttctttctcctcaaggaattgaatggttttttcagttacattattctttctccattgatccaaatcgaccagcatcacacctgaattaaaataatagtcatgtgaatcaacttctagtcgagcaagagcttttgcttgaccgggatcaatcacggcaccaatgatatgatcgcccaaattttggtcgtataattcagccacatcagttaaaacaaatgtatctgagtctaaataaagcactttattataaggagaattttctaataattctggcaatgaaatgcgtaaataggcagttgtattaatatgatcactgatcataaactcttcataaagccttctattgacggttaaaaattcgattgctgccttatctgaatatgcatctattaaagcctccagctcatctttgctttgagaggaaagattatcatcaattacaaagaagattcccctcctatccttagaaatagtatccattactgaacggatcattactttcaaacagggaacataattctcatcagaggctgtaacaattggaatatccatttcgttacacattgttaaaagctttgtcattaaaattctctcctttttattatttttaattaattttcgttgagaccatcctaatacggaaaatcaacaatttcaaaaaacacgctcagcaattattcaatatcgttaaaaaaataaacaaaaaacaccaaaaaaatgacataataatagactacagttatataaaaaaacagctgtttttaaaattgataaaaacaactgtaaatagcattaaatcaagaaaatagacagattaaattatgaacataatagatgcttttcactcttaaaatagtgactaaaacgttacacaaaattggaagaaaaatgtttttttcacttttatatctttttttgatttttatggtgagcaaaacattattcgaaaacattttgcattaataaatcaaatctatatacaattaattattatatttagtcaaacatagcgctctttataatttttccttttctaagaaaaatttgaagctctctcaaaaacaaccgaacccttcctcaaagactatatctctgttccactccttattattcttattaataaatagacgagcaggcttttttacaaagagtaactagcatcttatgcttttagagtaaacaaattagaaaggaagttttgttatgaataaaggcctgaaagccatcttaatcattatcttattgattctgctttccatcttcttaccaatcatcgcgatttactattttgtcgcatcaaaatctttagatcttacttctctgcaacgtcttgtattaacaaatgagtatattcaaagctacttattctgggctgcggttgtcctagcaatcttaacagtagtcattatgttgattattttgctttatccaaaacgtgtgtcaacattcattttgaaagaacaacgaggagctttggctttagataagcgcgcaattgaagggtatgttcgaacaagtttaaaacaggaaaacttcatggatacaccaaaagtcaatgtgattgcgacaaaaaataagcttaaagtcaatgtgcgaggacaattgaaaaaaacatcggcattaattgatagaactgataattgggccaaaggaatggaaaaacaaatacaccaattattgggatctaaagagaagttctcgatcaacgtaaaattttattcttttgattctgattcgtctaaaacaggcgttgtagaatcacgagtaggttaggaggaggaggaaatatgatgaaagattttttaactagagatagattgcctctgattggcggcatcttaggttttattttggctgtattgttctttacagtcggcttcttcaaaacaatcctattgattcttattacgatcatcggaggagcgatcggcatctatgtgaagaacaatcatctcttagatgaccatctaaagaaataggaggaatagacaatggaaaacacaacaactaaaagtggtgcagacacaaatgtgaacaaccaaaacgtgaagggtgacctcacttatgaagacaaagtgattcaaaaaattatcggaattgccttagaaaatattgatgggctattaacagtagacggcggctttttctcaaatatgaaagagaagctggtaaatacagatgacatgaccgcttgtatttcaactgaagttgggaagaagcaagtagctgtcgatatggatatcgttgtagaatatggtaaagatgtagaaaaggtctttgatcaaatgacagaattgatttctaaagaggttgaaaggatgactcatttggaggtcattgaagtcaacgtaaatgttgtggatattaaaactcgagaagaatatgaagaagatagcgaaaccgttcaagataaggtcagcagcgctgctcaaacaactggaaaattcactgctaaacaaaccgatcgagcaaaaaatgcattaagcaatcaaaaagccaaaacaagtgatcaattaaactcagaaccccgtgttcactaattttaaaaaaaagagctgcataaaaaccgtgtaagtaaccctgcccctaggtaggtggtaacttcacggtttttatttttttatgcagaccttcgctcatgggatcgtctatttaattacgtcaaggtcattcgtaaaaatcttgtgtagcaccaatacggtgaaaggcagttgaacaccgttaaacaaccaaacgccgcttttcgtcatgactatccattattctgatttccatctatcatcctaataaagcaacaactaatggtcccattattgtaagcagtacatttccaatcgcataagcgggggtaaaactaattgagaagacgctgctctgtgtttcttcactgaccgcgtttaaggccgcattgattgttccggctcctgtcaatgacccaatgttatcaattgcattcaacttgagtacatatttactgaaaaacaatgtaatcacatgcggtaaaatggaaattaccgcgccaatcaataggacttgaacccccattgaccctaatgctttaacgaattggcttccaacccgacagccgcaataaaaagattcaatccgacactttttaagaaccaacgtgtagcactaggaatattgccaagataagcctttttattttggtaccagccaaagaagataccgctaaataacgctccgccaccagcacctagagtcaaaggaatgccgccaatcgtcaatactaaagttccgatcaagatacctaaaacaatcccaatcgacataaaggtaacatctgtttcagaactattatcaacagcatagcctaaagtaggcaggacttttttgacagaacgatcaggtcccgcaatcgtcaagcgatccccaggcgtcaaagtagaaagatcctcgatttttttcccgtcgcgggtggcatcgattacgacgatattctcatcaatcaatgtcgataatgcatgatggttgaacacgtttgtcagcatcagctcaacggttcgcaacggtatttttcggtaagcatcatcaaagacttctttatagtaaacccccgcttgcataactttccataaatcttcactgtctccaagaactgtcaatacctgacctttcttcaaaaccgtgagactgtcaaaagtctggggtttatgtttactgaatacttgctgaacaatgactttgttatgaaaatctttttcgaacctactaatcgtcaaattttcttttggtatctgcaagatttgaaaagatcttgtggacatattgcttaataagggcgaaacattgtgatcatctgagccggtgtccaaagactcaaccatttttttcgtttcatccttcaaattaactcgtaaaagtacaggggcgatattctttaaaaagatcgttgcccccatcgttccaaatacatatgtcaccgcataagcaatcgcaacattagaagtcatagtagctttggcagctgcagagatatttagtccgttgatggcagaagttgctgtaccgatcgttgctgattgagtcaaggacccagcgataatacctgccgcttctccggcattaagtttaaatagtttgaagagtatcattgcaactccaaatcccaccactgaaaaaaagaccgactgaacgactagcttcaatccagagcttttcaagctttggatgaaggctggtccaacttcataaccaacaacaaaaataaagagatcaaaaaagacacttttaagaatcggtgcgatcgtaaatatacctaattgcccgaccaacaaccccaccaataagacaccaacagtcgaacctaagctaaaagatttaattttaaatttgccgataaaatagcccccagcaagtgccagaaagatactgatgatcggattcgctattaaaaaactgctaaattccttccacatcggtcttcctccttactgctgtaagaaactttgatggtattcatcaattaattcaagaatttgtttcgcaataatttcataatcttcatcaggaagattggcctcagagacgcgtagttctcccggctgagaaccgaagcccacaccgtccatcaaaaccacaccatttttttgcgataaattatagagaaaatcgacttgttcaaactgttccatcagatattttttaaattctgaaccatagattttttctgccaactgataaatattgatcaaagaataatacttgctgttttctttgctggcatttccctcaatattcaatcctttaaacaaatcttcataacgacgattaacaatggctttagaggtctcaatatatacatctttttcttgtgaaagtaaatgagtcaacgagaaaagaacctccataatttgttgtggagtcgacaatccagatgtgtggtaaagtccaactgaccgactatctgctaccattcggtcaataaacttcattttttctggttccagcacattgattgaatagcgtgtcgtcagctcagctttcttttcttgtgaaaaattgctgattaagtgatcaaaaacattttccttgttcacagcgaccacccctaaacgccagcccgttgctccaaaaagcttcgaatacgagtatactaatagtgtattgtatggaaccacactataaatcgtcttgaactcatcgacaaatgtcccataaacatcatcagtaataataatcagttccggtttttcggctacaacttttttgatttcttctaacgccgtatcatcgaaggccattgctccaggatttgatggatttaccgcaaagaaagccttaatttctgggtcctttagcttgtcgagttcactagcttgaatttcccagttatgttcttcatcagaacgtagatcgacttcgaccatttcgtaatcattcaattcaggaatttgtaaataaggcgtgaatatcggtgtattgatcgctattttatctccttgcttgattaatttattctcctttagtgaattaaaaatataaacgattgccgcagttccaccctctgttgggaataaatcagtttgttcagctagtttttcaccacgatacaaagtagattctaaataagcgttgattacgcgttcgctatgtttcagaattctgctgggaactgggtaattattgccaatcacaccatctaccaattctttaacaaattcatctttatcaatttttagcgtatcgtgtgcgtaattcactgcatcgatcaaaaattgatcaatttcacttgttttaggtgataagaaagtttccaaacgctcgcgaattccttcaagtgtagtatatcctgccaaatcgccttccgaaattgtacgactggattctttagcaccaaattcaatgattcgcgcaaatgctaaacgtgcttttgtattgatccaattgggatttcctctgcctgcattgagaaaaatattactttttttgttgtgctgagctaatttcaacatttcgttgctaatttcaaacgcacctaatttctctaattgttgttcttcatctcttatactcatcgttaatcccccctttgttattataaaaatctttttgatgctgacagactagcatttaagcgcttaattgaaaaataagttgctcaagaaatcatgtaatagtcgaattcgcataatggagattagaaaagggcatgcaaaatagcctgacacagcatttgtcaggctactctactggattgattcttttcatttaattagaccacaacaaaaacaatagatgattatattggcaacttcatctaatcatttgattattttcttcttttcctcattctacttttcttttgcctgcaatgatagtcattcaacatcttcttggttgcttctattcctggtttctttttatctaataatcctgttactggcttctgatcatccttaggcggcgacatgagtgcagacatcagtgaatgatcagcttgttttgatgtgagattcttcgagtcatcagacggcagaatttcttcttgctccgattcctcctctgacacaagtcgcaaatccgtcaaagtagcctcctctggtaattgttctttgacaatttccagcaattcctcgctgttcagattctccaatttaatccctgccggcaacgcaatctgcttttcttctaactcttcaatcgtttcttcatttgtcgcagactgaataagatcagctaatgttgatctaaaaggcagcttcttttcttcgactacttctagctcctcaaactcttctcctttttttggagctttgctttttttaatcagtgagtggcgggtacagttcatcacatctgaactaactacctctacaaaaagacgaaccccatccttttcaaaaacagttaacagacttaaaagctccaagattgccttaaccttctcctccgatagatagggatcggcatcccgcaggctccaagcttgtgtctttttattttcttttaaaaagatcgaggtaagtttatattgctgatcctccagctcctcgatcggtgttgtcttttcaaataaaaactctttataatgactgattgccgtatcataagaatgatagtttttctcattgtcaaataagcgggtcattacttgtttccaatccccgccagaaaaatagcttttaaagaatgaagcgagcgcacgcagagtgtcatcaggttgtgagtacagaagaatctgttgaacaatcgttgttagcatccctgagaagtcagttaccgtcaacgcattgcgtaataataaagcaaacacaaattgaagcacagttgcagcatcttttgtttcttcgaaatactcttcaattcttttttcaacagactctcttttcataccaaagatttgacgactagttatttcctttactgacatgacactctctcctcactattttaaaatatatattttcagttgatagcaacactaaacaactcttcgaaattaatatacgtcaaaaattcaaaaaaattaatgagttattgaaaaatatccgattcaatatttttatttttaatcattgaaatgaatggaaggcggtctgaagggattttcttaaaaaaattgagtcattcttgatttttttaggcaggaagtatacagcttctgtttataagaaataagaaatcagaggtttatttttggtgctaactttaaggcttatacctgattaagtacaaaatgaattaaggaataaggggtgaaagagtaattatcacaccatccttggttaatctggtccaccctttgaaatatatagaatatcgttattttaacaataagaaaaatgtcagtattatcccttttaacaacacattacaaatctcattaatgagataaagcacagggataagttattgttttacatttttaactataggcatacaacttcagcatatagttactaaaaagacggagacagatactaaagtaaaatacacctcctcctaccgatcatccgatcttaacctcctgtaatttaatgaacccatttcagacctcacactctttaagaatcgataatcgacactcataactgtttttaaaaacagtcacatcactaaagaacaccgtaccacctttccaattcttcatgtttccgttatattaaagttatcttattccaaaacacttctactaaaataataatctcctaataatgatttgaaaaatgaagccaatcatatttattgaacgttccatgatatctttagccatttgaactgaggaggaagtatgaactcaacaaatttcaatgcaattatcggcttactgctgtcactgattgttattgcaattgcacttggtttgatgttccttttttcattaaccttttttaaaatattaaaaacgcttcttttgggtgaaaaaatctccttagtgccttattcaaaggtgacagagaaaatgtatgaggaaagcttccttttagctcataaaaggatcatgatcgttcggctgctgttcaaatctagacgtttcaaatcacctgccaatccaaaagggatcgtgtcttgtcttaatcataagcagtcttactattatccacgacgatttcctaacatgaaacaaacatggccgctgaaatatttgaaggactccaaagggagaatccttttggttcacgctggatatagaaccttgatttctttaattaccctcgttttagtccttctaattctgttatttttgcttttttcaggtattcaatttttattagattgcgggcaagaactttggattaggtattagaacagaattcctaatgtaatttcgaaataaatctatttttttattcaggaggctcgatatgaaaaaaatactaattattgatgatgaacgagatctgctggaaaccttcagggattattttcaactgatgaattatctcgtctacaccgctgaaaatggctacgaaggactaaagcagcttcagtatcaaccagacatcattattttagatgttaatatgccagagatggacggctttgagctctgtgcagccatccgagaacaaattacttgcccaattgtttttctatctgcgaaagaagatgaagaaagccgaatacaagggttgacgattggcggcgatgattatttagttaagcccgtcagcttaaaggagctgggattgcgaattgaggcgcatcttagacgagaaaatcgtaaacaatccgcacgaaaggtagcatattttgacgagttgatgattgactatgatcaaaaggtacttttctatcgcaaacaagagatttatttaactaaagtcgaattttcaatcgttgagctgttgtctaaacatcccggaagagctttttcaaaagaagaaatctatcagtatctttgggactgggataaactaggtgatgccgcaatcattacggagcatattcggcggatacgaaagaagctctcagaatactcagcgactgactatattcaaaccgtttggggggtcggctataaatggattggctagatgatgtaattgctcggctgtttgctaaaaggagcagccttgaccaaagtctgatcctttaccttttaattggcatcttaggaatcgtctgtgcaacgcttatcaccgtctccatctgtgttagctgggaacggctaatacttatgccagaagaggaacctacttttttttggaattatttgacttgggcgccgcctagcacttcattaccaacgattaagctgttggaaatggtccgacagtctgcggtttttgtatatagctttttggggatattttttgcaacgaaaatgttttaccgcaaacgaatcttgcagccgattacgattttagaaaagagcatccagcagattgaacaaggaaattatcaacagccggtctactacaatacctacgatgagtttgaaaaaacctcccttgggctggagcatctgcgactgacattgcagacaaacgagaaaagactcaaagaaatgtatcgtgatcaaaaaaaagtcaacgccgccttttcccatgatctgcgtacaccattagcaacaatccaaaataatctggagctactagaagcctactatgaacaagatcgtctgagtccggaagcctttgataaatccgcgacaaaaatcaaaaacagtattatccggctaagctccttttctgaaacgatgcagcaattacagaagctagaagatcgtccgctgtacaaaaaaatgcaacctttgagtctaattgaagagcatattcgagagattgatcaacattatccggaaaaagagctgctgattacgaaagactatccaaaaatcactgcgaaatacgatcttgatctgattaacgaagtagtggagaatttgctaaataacgcttatcgtttcgctaagcaaacaatcgacattaccattgcgctacaggaacagttagtcattatttatgttaaggatgatggccctggtttttctaaaaaggaactgttaacagcgacagaaccctactactcacaaaataaaaacagtcattttggactgggcttaaccattgccgaagcgctggctcaaaaacatggcggacaattaaaaattgcgaatagtcttgatagtggcgcgatcgtttcggctgtttttttgcttgattaatagaaaaatcgacaattgtagagaatttatagagatttgatgagtatcctttaagtaaggcaacagaagaatgaggagggatcaccgatgcaaatcgaaatcaatcatttgaatcaatactatggcaaaaaacaagttctctacgatataaacctgtctatttcaacggggatgttcggcctgctgggacgaaacggcgccggcaaaacgactctgttaaaaaccctcgttaccctgcttccgacaaatgagggagagatccgcatgaacgggatcgacattcatgatcagaaaagaatccgttcgatcatcggttttttaccgcaggaattttcaatgtacggcaatatgactgcgtatcaggcgttggattatttggccgtactctctgaattggataaacgaacacgccaaacacggatcaacgccttgctggaacaagtcaatctgacgatccataaaaatgtcaaagttaaagccatgtccggcgggatgaaacgtcgtctaggaattgcgcaggctttgctgaacgacccgaaaattctggtggtggatgagccgacagcggggttagacccagaagaacgactacgctttagaaacctcttagcggaggtcagtgaaaacaaaatcgttttactatcgacccatatcgctggagatattgaagctgctgcagaaaatgtcgcgattttggaacagggacgaatcatcttttcagattcaattgaacaattactattgaacgcccaaggaaaaatctttagcgttcaggttccgcgaacagagttgaatgctgcaaaaaaacaagttcaaattatcagcctgcaacaagatggcagtatctctcacctgcgcttcattggtaatccagctgcatcaatcatgcgccatccgctggtgattgaagagcgtccgacattagaggatgcttatctctacctattatccatgaaaggtggggattagtatgctactaaagaaagaactgggaataacgttgaaaagtctaacgtattggctggttgtcctcttcatcggtgcctttctctttacacaattaggctctgattttatttcgctaaaacagcctgaaccaggtaaaaatgattatggtatcggtcgagcgaccgataagcacgccattcaacagcaaacgatcttttcattgttgcagcaatacaacagtaaaggctttaacacctatccttttggtttcttaaaaaccgttacaccgtcaaaatccgataaagcaacgatcaaagaaattctagagcgagcgactggaaagtcagtcgcggaattaaatcaagcccaatcgaatctggccatcgaaaatccgcaaatcgatcaatttgctttggcagaaaaatttgtactagcaaaagactacacctatcctgccttcgaaaaggatatgcgcaaagtagaagagctgattggtaaagggtcggatttctctaagaatgtctatttgaatcaaacaaaaagacaattaacctatgaagaagccacgaagaactttcaaacaacattgactaaagaccgagtctctggcgcctttgctcgtatgacctgtgattatttaggattggtgctggctttggttccagtctttatcgcagcgaccgtcgttctgcgggataaacgtgctcaaagccaattggtgattcactctaaacgaatttctagctttaaattatacggcactcgttttttagcgaccgttctcttggtgctattgccagttattctgttcagtctattgccggccattcaatccgtctatgtcgctcaaaaatatcaacatgttggagatttgctgctgttttatcaatacattatcggctggtccttaccaacaatcgtagcggttatcggaattagcttcctgatcactactgtatttaatgggttggtgagcgtcatcttccaattaggcttttggctcttatcacttatgagcaacggccgtaatatcgttggcagcgttggggtcaatctgatcccgcgatttaatacagtagggtctcgcgaagtctttgaacagattttttctgaattagttatcaaccgcgtcctttggtttgctctcggtttgatttgtttcttattaagctgcgtgatctttgatcggaaacggaaaggacgaatgcactatgggaattctcgctaaagtatccatcgctttctggcgatttcatttttacccagcagtttttacggcgttcctgttaacgctgctctttcccaccttctttggggtcgaaaatgcgccatttttgcaaagtgcggagatctatgaacgcttctttcccttgatcggattgatactgtttatccccctctatctgcctgatagttcggaagaaacaacattactgatcaaaaccaaacgtttttcctatgtaggcatcttatttttacgttttcttcagattcttatcactttactattactgacttgcggatgcttactgatttttgaattgagcaatgcaacgattgaattcggcttgtttttatttagcggcctggctaatgcgctgtttatgggcgggctatacgcgattggttttgtctttactacccaacctgttgcaggcttgattctgcctttgggctattacgtggctagtctgttcgctggtgaaaaatatttaaagatgttttatctctttgctttggtagagaaagataccgattctaaatttgtcctgcttttcagcggactactgttaatagctatcagctttatcctaatgaagagaaagaaataataaagtcgttccatcctagaaaatacttaggatgaaacgactttatttttagctgttgatttgttccccatgcttaacctgatttttatccaataagtcaaaactttccccgccattggtaaccagcgttaaaacaacctcggcttttcctgcatgacgaattttatcaaagtctgcaatgactagtagcgtattttcatctactacttgtccttcttgaacatgcacctcaaagggagcaccgtctaattccaccgtgtctaaaccaatatgaatcaagacttcactacctgactgactcgtcaagccaattgcgtgcttggtttgaaaaatcgtggtgaccgtcccttcaatcggcgcataaatttcagatgcagtcggttgaactccaaagccctcacccatcattttttgtgaaaacacaggatcagctacttcgcttaacggaacaaacgtcccatccacgggtgcaaagaaagcttctgcttttttctttttaaagcgttcaaacattttctattctccaatcctgcgtattaatcatcgcgtcctaataattgattgatttcttgactaaacaagtcggcttttccgccaaagaccgcctgaataccgccttgaacttcaaaaaccgcagttgctccaagttttttgaataccggtttttgaaccttatcgccttgttttacagccacgcgtaaacgcgttgcacaggctgtcacgttttcaatattttcatctccgccaagtgcttcaatgatctgccacgcttgttccttcaaactcgccgaaccagagtcatcggctacttcaagcatgtcctcatcattttccataccaggaatcgcaactttaaattttttgatacaaaaactgaagacaaagaaataaatcagtgcccaagcgatcccaaatggaatcactttgatccaattggtcttatcatttccctgcagaacaccaaatagcaaataatcaatcaagccgccagaaaacgaatttccgatccgaatattcaagatatcggcaaaatagaaggacaatccgtctaagaaggcatgaattacgtagagccaaggagcaacaaataagaacatatactcaatcggttctgtaatcccagttaagaaagacgtcaatgccccgctgaaatacaaaccgccatttttcttgcgattttcttttggaatcgcgcgatacatcgcataacaagcggctggcaagccaaacatcatcgttgcgaaacggcccgcaaagaagcgagttccgtaagtgaataaaccagtatgactagaatctgcaagttgcgcgaagaaaatattctgtgctccagagatcgattgtccggcaaccgtttcaaccccgcctaaagaagtgtaccaaaacatcgggtaaatcgtgtggtgcaagcccacagcgccagtcaaacgcaataagaatccataaaagaaggttccgatactccccatttgcgcgacctgctgcccaatgaccaccatcccattttgaatcggcggccaaatcagatagaaaacacaaccaatcgcaatcgcgctaaaagaagaaacaatcgggataaaacgagaacctccgaagaagcctaaaaattgcggcagctcgattttacgataacgattatgcagaaacgccaccgttccaccgatcacaatcgaaccaaccacaccagtatcaatgctggcatctttagcagaaaataattccaataacccgctgatcgtcgctgtataaactaaaaatgccacaccacctgctaaaccggctgtccccttatctcctttagccaacccaactgcaagaccaatcgcaaaaatcaaggcaagattggcaaacacggcatttcccgcaaagctcatgacacttaaaatcgtttgcagccatggctgattcaaaaatggataagccgctaccgcactctcatttgtcagtgcgccacctaatcccaacaacaaacctgccgccggcaaaatcgcgatcggcagcataaaagctcgtcctaactgtgaaaactttttaaacatgatttatcctccttattcttcattcatcaatgcttgaataaaacgcgtcgcaatttccttcggtctagtaatcgctccgccaacaacaacgcccacagcgcctaaatcctgaatcctttttgcctcctctggtgtatgaatttgtccttccgcaatcacatgaattccctcatcaaccaaggcttttactaaatcactggttgagatcgaatcagcttgggtataccctcttaacgttgtaccaacaaagtcgacacctgcttgccaagcattaaccccttcttcaaaggttgaaatatcggccatcaaaagttgattaggatatttctctttgatttgtttaatcaattgattcgttgtctggccatcgggacgttcacgcaaagtacaatcaagggcaatcacctctacattcgtttccgctaacgcatcgacctctttcatcgtaggtgtgataaaaacgtcagaatttggataggtctgtttgataattccaataatcggcaaatcaactttttcttgtatttgctgaatatctctgacggtattcgctcgaatcccaactgctcctgcttcttttgccgctaaagccattaatggcatgatccccccctcttttgtatacaacggttctcctggcaaagcttgacaggaaacaatcaagccgcctttcataatacttaaaaactctttttttttcacgctccgttttcactccgtttttaaattattttggattattactccaaaaatatagcatgcgctttcaaaaatgtaaatagaaaatgaaaaaaaaagttttttgacgtataatcgaagatgacaactgagaggaaaaaggagaaagaatgaccatttcatatacaattcaagaaaaatatgcgaccctaacaaaatccgaaaaaaaaattgctgactatattttatccagcggtgaaaaaatcgttcacagcaccatgagcgacatcagggaagccgcaactgttggcgatggaacgattatgcgtttttgccaaaaaattggcttttctggcttttcagatttaaagatcgccatcgctaaagaagatttcagcaaacagcaggaagattcacaggaatctgatttttttgataaacgtactaagaccatcgacaaagctttaaaaaccacgaatcaacgtttggataataataagcttaaacaggctgtccagatgattaccgaagccaatcaaatctatatctttggcgtaggctctagcggcaatactggaaatgatctagaagcaatgctgctgcgcgtcggcgtccaatcacgctcagtgatcgatcctcatttccaagcacaaatcgcttctctgcttaccgaaaaggatttagtgatcggcttctccttgtctggtcgaacaaaagacacccatgattctttgaatatcgctaagaaaaatcatgcgaagatcatcgccattaccaattaccaactgtcacctatcgcccaattagctgacgttgtcctgcaaacagcgatcgatgaatttttggacggcgcttcactggcaggtaaaatctcccagttatatttgtgtgatttacttgttcaaagctacgagatcgaaaataacgtaaacacaatcgagctaagagaaaccgtgttacgctctattttggataaaagcttggattgatagttaaaagccgctcacccttgagaaactgtttagggaagcggctttttcttcgtaagatgtagtaggaaatccaggttcattttctttcatgataaacccataccaacaaaaaggatataattttctgatttgtcaaattaagctaaacaatatatctttatctatgcagctcaaaaatacttccaatggtgttcggaaatttagtgattttcttggatgcttctgtgctttaaattaatgctagatcagttagtttgcttaaaatttcaggtttattagagatgtaaagcccttgctttcctttgtactcacgaatttttgtaaacatatttaataagtcataacttaacgacaacttttccaaggtttgataattaaattctttcaccacaaccactcctttttctccgccattttataatatttggcggagaaaaatcttctttcaatttttttccgctaagtaaagcttcatttaatcacgatcaaaaaagctgcctatcttcttcgacaggcagcgtcttctgatttattttattgtacggtttgctgattcggatcaatagcttgaggttcttgttgggccggttgctgatttggatcggttgtttgtgttccttgcggatgcatcgcgaaatattgtgcttcacgattctcagcattttgctgcagattgtaataatagaagctgatgtcattattgtggaatgaaccagctgggaaaatcttacgcgtactttccggcatctcatatttggctttatctacagttgaggagaccaccagacctcttgttccatcaaccgtcgcatctgcaagattcatgaccttcgagtaatcaccgttgtcatttcgcacataagaacctagattttcttcagctgtcgctggtgtgccatcggttctccagttaattggattaatcgctagtgcgccttcatcccaagttggcaaagtaccagtaaaatctggcgcaaccgtattatatgaaatgactacaccggtatcatccggtcctgtcgcaaatttcacttgcggattgtcgttcatttcttgttgggtcaccgattgacctaatacataggcggcgatcatccgatcactgactccaggattatttttgaaataatcatacatgatggctttgagcatccgagccccttgggagtgtcccactaaaatgaaaggacgattgttgttttcatgtttgatgtaataatcaaaagctgccatcacatctgctttaggaacaccatccgtatattgtgcctgttcttctttagattttgtcagcagccattttgcatccaattgacggtaataaggtgcataaacattgccgctggtatcaaaggctgaaccttgtgtcgctagaaatacttgcgctccagcacgcatcgttgggttatcgatttttgctacgggagatgaattttcatttttttgtgcgtaagccgttggatacaacataaagacatccgcttggctcgtgatttctgttggctttgccagccaattatcagcattgctatagtcgctggctttgatggcttcgccggctttttctggttcttttgcttttttgatcgttgttttccgagcttcttgctttggtgcttcttcgctagtaaagaaagtcgtataagcatagtagccgccaacacccaatacagctactactaatagtccaataatgaattttttcattgtgtcctccaaaaagattttatgtacctcattatagggtagttcggttttatttgacaaattccctgtgtatttaattagaaaagcttatgaattgtttgttatggattagtgagtaatcattagaaatcaacttcaaaatgccaataagccaacagcattggttgccatgatgacatttttactcgcaaatggctacttaactaactttaagccaagaagttacaacaaagcaagcgctcaaaagaaaaatccgagcgcttgttgattaattttttttattcgcttccaaggcattggacagtctcgcaaattcttctaaagatagcgtttcaccgcgacgctttggatcgatttcggcttgttctaagctcgtttccaaccaagttttcgttaattcgtctctgccataactgcttaacaaattgttccataacgttttacgacgcatattgaaagcggctttagtcaatttgaagaattccgcttcgtttgtcacctcgactgcaggtgtttcgcatcgtactaaacgtaaaatcgcagaatccacgttcggctgtggaacaaacactgtttttggaacaatgaaggccgtacttgcttccatataatattgaacagcgatcgataaggagccataagcctttgttcccggttttgcggagattcgatcagcgacttctcgctgcatcatgaccaccatctcatcaacagccaaatctgattctaagatgtgcatcataatcggtgtcgtaatataatacggcagattcgccacgactttgatcggcagcgtttgatcaaaatactcggtttcttttttcaggtccacctttaaaatgtcgttgtgcacgacgctaatattgtcatagggacttaaggtatcttctaacacggggatcaaacgatcatcaatctcaaaggccaagacttggtgagccgcacgagctaagtgttcagtcagtgcaccgatccctggaccgacttcaattacgttggtgtgtttatcaatttccgctgtagcgacgattttttgtaagatatttggttcggtcaaaaagttctgaccgagactcttcttgaaggagaagccatgcttttgcaaaatttctctcgttctagaaggtgttgcaatgtctttataattgttcaagaggtttcctcaactttcttcatagcctcatgcaattgtgcttcggtgatccgaaacatcgttaaacgtttttccaattgtttggcgttggtatagccaatcttcagctcatcccctaaacgttcccgccgttcacgggcttgagctcccgctattaaaccataatccaacagcgtttgtctagctatttttggttgatcgccctcagcgggagtgacaaccttgtgcagcgcgtcgatgatcgcttcatcgctggcgtgctccaccccaagacttgccccgcgcttttgcggtgccgccattcttctggataggaaggcgtgctgggcatcggggatcgcctccatgattgtcttgcgaatcttctcaccggaaaaatcaggatcagtaaacacaatcactccccgggtttcttgagcatgttctatttgttctaggatattttcattgatggccgaaccgcgagtctcgatcgtatccacatcaaaaacttccttcaaacgtttggtatcgtctttgccttcgactacgatgatttcttcaattttttccttctgtttgttatccattggctttgatcctgaataagcggtgtgcattttccgtcgtttgccgggctacttcttccattggtaaattccgaagttccgcgattttttctacaatataacgggtatagccgggttcattgcgtttcccgcgataaggcattggtgctaaataaggagcgtcggtctctactaataatttatccatcggtaccaccgctgccgcctcttgaacatctaaggccttcttaaaggtcacaaccccagaaaaagagacatgcattcctaaatctaagaagcgcttcgcccattcgccgctgccgctaaagctgtgcatgatgccgccgatgtcgcgaatatcttcttcctttaaaatcttatacgtatcttccagcgcatcgcgagtatggatgctgataggtaaattcatttcttttgcaatcgcgatttgacgacggaaaactttagcttgaacttcctttggatcttccatccagtaataatccagcccaatctcgcctaacgccacaacctttggcaacgttaatttcttaatcaagtcttcttcgatcgctttcgtgtagctgcccgcttctgtcggatgccagccgatgatggaataaattccttcgtattgctggttcagctccaagcttttttcaatcgtcggtgtatcaaaaccaactacagccatttctgtcacgccaagttcacgcgcccgttcaactgtctctggaatctcattttcaaattgttccgcattcaaatgcgtgtgagaatcaaaaatcatgtgtagtcctcctaaatccttcactcttatcttcaaaatccatttagaatcaacctattttaacacagtatttaaaacaaactaaagacatacaaacatgagagctttcacttttctatttttattatgtatatagctttaaatacgaaaatggtttgaaaacaaaaaagcaaatatgacatttacttttgtcacatctgctttttcgaatattcagcgtttcacacgcagcctctctcaataatagtagatcgacttaaaaaatccttacagcttatccaaagtgtaaacaatgtttccggtttgttctttttcagtcatttctcgacttcgatccttggcagcgaatgcctttactccgtgaacctcaataggaaggcgagcgtcggaagctgctaaaattttttcgcaaagttctatattattatccaataaatgaatcgctgattcaaaagttccatgatttcgaatgattctattgtagcgaccatcccattgcttcaatttgttcaaggccttataatgctcagcgatcgaaacactttctggaaaacaaatcaacgtgttttcgccgcaagcatccccaaaaacagctacctcttcttctggtattaaaaagaccatcatgcctttagtatggcctggaaccagcataagctcgatcgttactcctcccaaatcgaagaccatttcttctgtcaattgtttgaatccgcttgtccgttgcggcaatacctgttccgagcgccatgtttgtggaagcggtgtgggcgctgcctgaatctcttgaatccgaaaagctttggaacagtgtttcttttccagctcctcatctagaggacttaaatagacctcctcaaattgactgcttcctcccgcatgatcgcagtgcccatgcgataagataactgtatactccgtagtcgctaaatcatcaacaaagctctttaaatctccacagcctagtcccgtatctaataacgcaccgctcttttctccttggatataataggcgcatacctcaaaagccgttcgaatacggaagattctttgggttactttttcagtcgaaaaatacattagtctttcacggtcccttcatcaagtttaaagaacagcattacaacaaaaccagaaatcaagccaactgcgacagttactcctaatacgatatagttgtacgtactgcctccaacaaatcccgctaacccataaataccattcgaaatgttcaacacatgtcctgtcaaattcaatatgcccgcaaccaaaccagtgatcgctcctgagatgacacctgcgacaaacggtgttttataaggaacatttaatccatacaacaacggctcacctactccgcctaaaaaccaagtaatgatataaccaaacgtcaacgtctttttttcctttgatttaaacttaaagacacacgccaacgcgacacctgttgctgcccaagaagacgctaaaattcctggaatcaagaaattatcgtagcctagagtaggaaaggtcgtaaataaataagtgaataagaccggatgcatccctgtcatcacaataaaggcaaatgttgctccaacgacacaaacagctaacggtcgagcaaaagtattcagcgcaatcaatgcttcaccaatatatacgccgataaaaccacccaacggaccaaagactaccagcgtcagcggaatcatcactagcaaggtcccaaaaggaatcatgaacacctttaacacatctggagtgaattttttccaaaatttttctacaaaactcatcgctgcaatcgtcaaaatcatcggcaatactgtacttgaataattttgcaacatcgtaggtagaccataaacagagaatttaacaccatcctcggccatttgcataaaacttggatagagcagcacagcccctaatagcatcccgattggaatactggtttttaattttcgagaggcagaccagccaataaaaaccggcaagaaataaaatcccgcgtctcctacaaaggtaaacaactgatatatgtcacttttctctgtaaccacactcagcattgaaggtcctaatacaaccccaaccgttttgcataaagacgctactaacagaatcgggatcaatggtgttaaggaaccagaaagataatctaatacttgattaaaaattgcttttccatcttttctacctttggctgtgtgttcatcgctttcttcttcaccggccgctggtaataatttggtaactacatcataaagatttgttacagttggaccaatgattagttgatattgccccgcttttctcgtaacccccatgacgccatcaacagactttaccttttcatcgtcagcttttgcgtcgtccttcaacacaaaccgtaaacgagtcatacaatgtgttacattgtcgatattctcattccctccgattgcagcaataatttgtggtgccgtttcttgataattcattttcatgtacctccatttattttatttgattaaaataaaaggtctagccggccgctcccgtaaccatccagtacaaaatattttttcctcctttattttttatccgcgaatttcttttgcggttgttaaacgaatgacatgtatcattagaaatagtcgttcaccctcaatttccttttgatacttctcagagataacttgcataattttcgtcacacaggcagcttgttgagggtattccttcatcaacatctccatcatgtggtcgcttttatcatattgcagcatcccgtcttgaacgattcgttgcagcaagaagcgtagatgtaaaacaaatcttgccctgtcaagatcagaatgctctagtgctatacgggcgtccatgtcctcctcaatcacattcatcacttgattgatcgtctctgtaattcctacggtttcttgaatttcaagatccatttctgaattaacaatatggatcgcgataaaattcgcttcatcactaggaatgggcaaatcaacatgctccttgatcatcgcgactgcttttacagctaattggtattcttcaggatataacgcctgcacattccataaaagcgagctgtcgaaagtaatccctaaagccattcgctccaaaagattcgaaatatgatcggtcaaagtgatatgaattttatcgttgatcgtttttttggtaccattttttatgacttcaataatttcttcagttaactcaatgatatcatccgaaatttccatgattatatcttggtattggcgaattgtttccttggtgtccaatgtaaatactttttccgttttgctttcatcggcctcctgaccaggcttttttccgaaagcaattccttttcctttgacgattatttctgctccattttggtccaaactaatgatcgtattattattgagcactcgttttatgatcatgattccacctactttatcgtcaaaatgggggttgcttcattaactttttttagcaaagattttttttcaatgacttttccagccgcatttgtaatgatcaccatgacgtccgtatcatagcccgcttcatgaatacttgagtaatccatttcaactaacaaatcgccggcgtgtacccactgatttactttgaccttactctggaaaaatttcccatcaagttccactgtatcaactcctaaatgcaataggatctctacaccatccttcgttctcaacccaatcgcatgccctgtgggaaacaccgctgttacttctgcagccactggagcagtgattcgttgttccatgggcgatatcgccacgccatcacccagtatcttcgctgaaaacacctcatcatctacagattcaatcgcttttaattctcctgttactggactcaataaatccatttttttctctcctttctcgaataaataaacaaaaaaagacccatttacgcaaagtctccatggactttggtaaaccggtcatgcttagccgaactaataacaatccttaattacaatttcaagttatcacattctcacagctttgtaaaccctttctaagataatgatttactcacttttcaaattgtacgatcaaaaagcaatactggcagttgattcgctggggagtaattatttgctaaaaagtatactcatatacttttatttaagcgcgcaataattgctccatcatctccaaaactccctcttgattattcgaaccaatcacttcctttgaagcttgtttgactttttcctgagcattttccattgcataactcaaaccggcatattccagcatttcgatatcattgccgctatcaccaaaagctgcgatctcagtaggtgcgatgccccactcgttgcttaattttgctaacccattggccttatgaacgccaggaataatcaagtcaatgtcaccatgcccactagacactggaatcatttgatctgccaacacttcttccaaagcggccagcttctcctcaatgccaatattagaaaaggtcaaggcaaatttgaatatttcatcctcttgatttgcgacatctcccagccgctcaagtttttttatacttggataataaaatttgacgatgcgaaacacatcatctggaatatcttttgaaacataggcactttttttgccgcaaacgactagaacaatcggttgcagtgcgttgatttccttcaatgtttccaacactatatccattgctagtcgtgcattgtagtaatgcgtcccttcaacaatgatattggctccattttccgaaacgaaggacatttctgcatgattctcagggaaaaagctttttagctgatcgtactgattcccgctggcaacaacaaattttatctccttttccttcatttgttggaaaatccgatcaaatcgctcccgattgtattctttttgatcatctaaaaaggttccgtccatatcaactgcaatcatttttatactcattttagtcatctccctctatttattcgtcctcataagagtaacataaactatgggacgcatttcaggtcaagcgaaacttcattgagaaaactcgcccatcttttgagcatcaggtaggtactgttccacatcagctctgcaagcagtcgctgtgtgtctcagcaataagaccaaaatatttctaaattgccaagaaacacagtgttcgaagagaactgatgttgattggtacctacctggtgcttctcaaatttagaaatatttttgcttattgccgaaatgttagttctgcttaacggagtttagagtaactgtatgcgtagaaaagctagttcgtgaagccggacatgaatacgcctgctgtaaagcgacttaatcatgtgaaaattttattctttccttatagttaaaaaaatactccgtctaaatcccacagaaaatccgccgaaagtcggatgtctccttcaaatattctctctataataagcgttgtaagttactatttagagagaggtgagtgtatgcctgattttcaaaaggagtttccaaatgccgcgcgttatctgaaacaacgctatcctgataaggaaccactaagcagcttttggcattgggcgattttagcactttttgccctgctatgtatcgcaacaatcaagcagcaattgctattaatcggtggattgatccttgtttccgccttgatcaaaggaccaggaatcttagttttcggggccctctattccttgttagtcagtttatttccgccaatcggtgtcgttctttccgcactttttttcctattaaatattcgtttattgactaaaagctggcgggtaaatatcgtaacttcactattttacttgtatccgttaggcttgagtatcctgcgttacttcacccaatgggatgcggtatggcagattggacttcagttattgccaggattattactgctccattttgtattgatgcaggtttactatttccatccaagcgcccgtcaagtcgcttggactgtattagctacaccgtttgaattaatctcacttatcttgccaaaacgcttcaagaaaccgtttcggactaccacacaatcaacaagactaaaaaacgtgaaaaaatatcgttaaggaaggcaatcatggcccttctttaacgattttttattgtaaccagattttcccgcttcaattaaccatgttaagataaatgtgtagaactgacgtgtttgtcttttggaagaggtgacgattataaaccctaaatatgaaattcctacgaatgaagagcgtttagccaaagaatttgaaaaactaggccggcaattctttgataaagtcgatgcgaaaaatttcagccacgcctataaaatcctgaatcaactcacagataatccgcaaaaaaatccgcaagaaacgaagatttatgacaaaaacaaaaaactcatctaaatggataattcagttacgaaaaaaaactaattctcgctgcacatacgattaggctaaaccacctgtctcgcatctggttaagaagtaatctctgcctatcaaaattattaaactgcaaaagaaactaattcacaaataggcagccaagaaagctagtcgctttcctcgctgcctttttctttagggcttttgtggtcgtctaagccacgccctctattgggtggaaacgtaccctttcatccggctaatttgctaactagctgctgcaattgatacacatcttgattcgtcaaaaatggatcaatgacaacagtcggatattcctccggtacttcttccacactgcttgaagtaatcagtgcatcatatttttctaactctgaacgattgatgttcacattggtcaattttttctctacataatgaacttcaaaattcccgtaaatttgattctcgatttgactgcctaaaaaaaattcctctgtcggtgataactcagacaatagcagcagcttcaatggtcgatcacagctcgccaacaatgtcagactttgaggaaccattgttatcaaaagatatacgtaattccagataaaatcctcttcttggtagatctgataacgtcggacaaaatgatccacaattttctttacctttttgacagcttggtcatgggtctcagacaatttatctaaaaagattctccgctgacggaataaaatatcaatcagctgtccatccggctcataaatccgatgctcgttcatcaaaacgatcgccaattcctgttttttgtcattgcccaatgaaaaattcaataagctatcgaactcctccactagttctaagtgacgataataatagctcgcgtactcatcttctcttcttagtgcactgttcaattgcgtcttgctggcaaccaccacatccgcgtacgacaaccatagacaatccttgattttgtccgaagacagcttcacgcgaaagacctccagcgccattcgtttgaaggcatctaaaatttgtctttccggcagcatcagatcactatccagttctaaggttggataataatgtccatttttaatccgccacaagctgatatacatgttatagcctaaacgtttacgagaaatgtaattatcctctagtttattcacttggatgaattgattcaccaattccgtgatggctttgatctggaactcttttaaatcccgatacaacgagtccaaacggtctgatttttcaatgaaatagcggtaatacatgtgtcgaatcacactttcattcccctccaaacgtaacggacggtattgcaaggtgatacctgttttcaacaagacactctcaatcttcttcagattccgttgggtcttcgatggactcaaaaaaagcttcttcgacagatcgataatattctcgcactcttcatacagcagttcctcaataatttgaaactccggcgattgctggatcgtgtcggcatatagtcgattgatactgacatgcgatttgatttgcagctgataaagtcctttatattttacaatacgaaaagcgtcttgctggctattgatcagcttaacgtcctttaataatacagataatgagcattccaattcttcaagtaattgatcacttgatagaccaatgcggcacgcgtaaagcaattcaaccaaacgcagatgccgcagattgcttacccctaaaatatctctaaaattcatactatcaccctcttcactaactcctatgcttatccccaccaactccgacttctaaaaaactagcagtccttggtgcatgaaacaaaaccccttttgtgccatgctgataaactcattttttaaagcactaaaactcgctcatttcccctcctttagcttttttgtccgacaaaagaaaaagccaagcaatatcacaaaaataaaatattgcttcgttttatccattgtcttgctgtataataatggtaactgataaaagacttctctgcttttgccttcttaaaaaaagagagtgttatcgaacagctcatacagctctttgtaatggcttcatgacaaataagcaaagttatttaattcactttttaaaataaaaataaatttttttagaaactaatagttaaattttttttgttccgtttgaattaatgataattacggataatataaaataaattctgtaattattatttttattaattactaagaatttttcgcttcttcctttttatataacttaatatatgacaaaaaagagtgatcctaagaaaaggatcactctttttattactatttgattatttagccgtacgaatgttgacaaatttgacgttcacatattcctcgactccatacgtgccattttcacgaccaaatcctgagtgttttactccgccaaatggtgtcgccgaattggaaatagaggtatcattgacgccgaccatgccatattgtaatttactgctgacattttccactgtatggatattggttgagaagaaataagatgccaatccaaattctgtatcatttgcgtcttcaatgactttttcctcatcctcaaaggtaatcaacggaatcaccggaccaaaggtttcttcataaaagatattcatttcttttgtgacaccatctaagacagttggttcaaagaaattcccatcagcatactcgcctttatccagcttatgaccgccagctaagatttttgcgcccttatccgtcgcatccttcaattgttcaacaaccttttcgacgccagcttgattgatcaggggtcctactgttggatcttctaatccgtttccgactgttacttctttgatcgcttccacgatacgattcgttacttcatctttgatatccttgtggataaagattcgatttggtgaagtgcagacctgaccattgttgatgaacttagtttgaatcaatgtttccactgcccgttcaatgtctgcgtcagggaaaatgatatatggcgcatgtccgcctaattccattgaaacatttttcaacgttggcgctgcttgttcgtttagcttttgaccaactccagttgaaccagtgaaggtgatcttttgtacgtcttcagattctgaaagaattggtccaatcgtagaagaatcacctaagacgatgtttaccacgccatcaggaaaccccgcctgatcaaacaattccatcaacgctaaggcagatagcggcgtttccttcgacggcttcaaaatcaccgtacagccagcagcgatcgctggagaaatcttccgaataatcatattcgatggaaaattccatggagtgatagcgcccacgacacccaccgcctgcttgcgtacctgccattgattggtcactggggatggaacgatttcacctaataatcgttgtccttctgccgcgttccagcgaagattctccacattcgtttgaatctcaccttttgcctgcgtcaaaggctttccctgctccattgtcatgatcgtcgctaagcgatccgcgtcttcttccacaagatcagccattttattcattaatttcgctcgttcagccgcagatgtccgcgaccattcaggaaacgcgttgttcgccgcttcaattgccgcgtgaacttccttttcgcctccgacatgaacctcaaccaatgtttctcctgttgccggatttgttactggtttggttccttctgagccttccacccatttgccattaatatagagacgtgtttcgactgctggtaaagcttgttcttttgccatgtgtctaattcctcctattttatcatgtgcagtagtggttaaaatcgatcaacagcattcgtatcatttttttcctgctgtttactacattattcaccgtaacacggataaaaaaacaactcaaaaaataagcttaaagaggaaaatgcttatacaaatctgataaaaaaggaaaatagacagtccaaaacgaatgatctctccattttacttttgttatgcttaacaaaaaacggaggactgctatgtttgcgaatttgaaataccttccttaaaaatacaagctcatatttacgttgattgatctgttcaaaggcgtttccaatctccaacagctttgatactatggaagaaaacgaatggatgtgagcatcatggctttgatcgtgttgatcggctctcaggctgtcggaaagatgactgttggaaaagaattggaaaaacaaatagatggaaagctgttgttcaatcatcaaacattggatcttttcgcagatttcctcggctacagcaaagacgcctttctgctctctgataggaccagaaaagaattgttcaaagccttcgtcaataatccagagacaaatacgaccaaaacaatcatcttcaccgtagtcatcgacttcgattcagcctatgacattgaatttttacaggatatctcttcgatctttttagaagccaatcaaaaggtctattttgtcgaacttgttgccgccttgagagtacgcctaaagcgtaatgttcatgaagagcgcttgaaagctaagccttccaaacgagataccaatttttcaagaagggaactcctaacttcaacactgaaaaaccgttagtgaaatatcccccagcatttttcatttcaatttaattctcaaaagaggaaattttttgaaccagtattactctttactttatctcttaagaaatttagactaattttgtagcttttagatatttcattttcattaagctgaaaaaatgtggttaacatgtcatgaatgagatattcaaaacaattacctgtcaaacttcgctataccagtaatatactagcctatacgttaggagcaaaaatatatgaaaaaaatcatctttactttatctttatttactatgttgtcattagctggatgttctactaaagcaagtaagagcgacaatgcttctacaacgtcatctaatgctagtcaaacagcatcagaagtgacaactacttctaaaactaatttaaaagatagtaattctgaaaatacacttgatacgagcgtgaacatgcttgactcagaagaaagtacgtttgaaactcattctctttccagctctagtaatcaagaaccaacaaataactctgaaaataacactgagaattattaccaacaaatcaaggacgcgtggcaaaaggaaaaagactacgtagaggcgattgaagatcctaagttgaaacagtctgttcaaacaccttcggctgctgctaatgccatggcaagtaagttagagatggaaaatcccgcagattccaaaattattgaaagtagcttacaaaaagttttagctggtcaatgatactggggaaaatttcaaagttcataatgtaaataccctatttttacttttttagaagcaaataatattttaggaggacttttttgaatttaaagcaagcaaatcgggaaattgttgtaacagcgaccatcttattgttctttttcctactttctttatataaatccaactgtcattttctttttggagcaacaggcgcgtttgcaatatttctttattatatttcatgtcgaattactactaagcgaaactcttcataacacatttttaatttaagtctcttaatgatacggcccgcttatgagccgtatcctttctaaaattcttcatttgatgaactaaaaagaaaaaggatgtgtatttttgtttaaaaaggacgatgttgctttaatattttcgataatcataaccctttccctatattttcttggtcttattttagataactcagtactaagatttattcaaggattttctacagccatagtaattgatattataattcaaaaaattaggaatatccgttgctctaaagtaacctagttaactaaccacacttttaattcctccactaagccagaatgctagtaagaaaataaacgcttttgtctctatgaaaagtttcctattactaacagatctattttttatctgctgtactaactcaaaaagtacagcactcgtggaatttggctattctttatgtattttatccaagctgcctataaaaacagaagaatttagctgataagttttaactttttttaatgcattaactgccaaaatctactaattagcaaaaatcttcaaatcgtggtatgataactcatggaatttcgttatgaacgttttagttgcctttcgtcactaattgagaaaggagaatgctctatgacattcactaacaacaaattggaataccgcgtaactttagataccaacttaaatctatttattgttttcgacaaaaaagacgaaaacaaatttgcgaccggtacgacaattgaaaatgcagtacaagaattagcaaaaatcgcataaggagtgtaatcctctaatggacaattactgttcgtactgaaagcatctgctgtggctcacggtagatgcttatttttttgcagaaatagccctcctaattaatctcttttactacatccacactttttcaactaattctacaatcagataatcttacatcttctcaatttatcaaccgaacaatgacgctacatgattatttttaacttatttctttttatctaccgttcgcgtttgtttttgaacccagctacttgatacaatgtgttcgtctagtaatagacaaagtatgtgcgtgagctaggtaactaattgacaaattagcttcccccttagctccgagactgccgattcatgcccggcagtctttttttagcgaaaccacccgttattaccattcgcgtctttttcaataccgtttgcggttgcgtttttattcaactttgatagtatttcactgtctggcgaatacaaatcgctggatcaatgttctagacagtctctttagtaggctgtcttttttttttgcaattgcccagtaagtctttcttgctgttcacgactgatataataccgttcgaagttacttacataatgtaattttctataagtaagcgatccactgaaatttaaaaagaaaggtatcttatcatttataaaatgaggatattctcgaatcagagcttgacgctgaaatttttgtaaatacttggaatcgagtctaaactaatttattttagataattcaatttaattctcaaatcctagatttgcatcaaattgacgcaaaacgcaaatataccctggatttttttcaagcgcctgaagcatgtttatccgtttttctctatgatcagcggatctgctgtatcactttccaaaccttttggaatcttttttatttcacccagcgtccagtcatgctttttcccctcggcagttttaaaaatctatacaagcgtgtaccgatatttcgaaagttccgccttctcatatttctttttctattcgataggctgagttagctgaacttttaatcagtaggtcactaattcgaacccttatattcccctttggtgcaaaatttttgctctggataattgaccaatgtaaaataaaaataaattacctacagttagcctttcaaagacatattaaccgatgattatttattcctatataaataaacaaccagaatggaggttgattaaatgacaaatttattagcagctggcttcatgtttgttggtggtgcgatacttatgttagcaggtgaatatgccaaatgggtcccaattataggaagcatcattgccctaattggtttaggaatgttgatttattatttgttcagcaaagatggaaattacaatggaaattaaacgtttcttcgtcaacattaaatgcataaacctactaggaaaatccagttgtcaattagacttctggattttctagtacttacttgttcggcgtggttaacgtactacaatcgagtagaggggaaagccaactgaccttccgcccctctcacaccaccgtacgtacggacccgtatacggcggttcaataagttgagtgtacgaactggtacttcaaggagatgtcctcatatccttggtgggccagttctttgtctgttaatgatcgatgaagaatatgacttttagagactgaccaaataccttttcttgtatttgaccattcatacgctttcgctttatcgatccctaaacgaatcagatttttccttttggttctcggattcttccattgtttccaaatatattgtctgattcttcgcttcaaccaaccgtttaactccctcatgaattctttcatctcaccaattccatagtagttgatccaaccagtcattagttgcttgatttcttttaaaataagttggatacttcttccacggtttcttttagtgagttgtttgagcttgcttttcacacgctgttttgcttttgcgtgagggcgaattttaatacctttctttgttggcagaatgcagaatccaagaaactttcgtttcaatgggcttcctaccgcactcttttctcgatttaccgtcaactttagttgttcttcgagaaattgaatggatttcttcatcacacgctgtcctgctcgtttgcttctaacatagatattgcagtaagtagcccaagggaacctcccccttaggccctctcagaaccggacgtgaacctctcagctcatccggctcccattatccagccgatggtaatattccaattttccaatgcgcgaataaatttctttctcgcttggcgatttcccctaaccaatgttccgcttttcttcgtgcttgtcgctttttatatttacgacgaacccacttcacgagacattggttgatgtagcgcagtagactgtacatttctgatttatagaatttcatgtaatagttcatccatccttgaattttactattgaacatattcgctaaatcctctagctttttgtccgcttttaattgtaatcgccaattccttacctctttgcgaatcgcctttttcgctttatctgatacagccggaagaaaatttgtgaagcattttccatatttattcttggcgcctctaggtctaaacgtaaagcccaggaaatcgaatgtcgttatcggatagttccccatcctatcactatctctgcagtaaacaatctttgtcttatcaggatgtaactccaaaccaaagattctaaaccgttcttccaatcttttcttcagatatttcgcttgctttagggatacacaatgagtaataccatcatcggcatatctagcccactgtatattaggaaattctttttccatgaagtcatcaaacgtataatgaagaaacaagttcgctagaactggactgattacaccaccttgcggtgtcccggcttttctcgaaacagtcgaaccatcttccctctggaaaggtgcttttaaccatctttccacatataggataatccacttctcttgagtgtacctttttaccatttcaattagatagtcatgtctgatattgtcaaatagtcctttaatatcaaattccagtacccaatctcttttccagcatctaactcttgttttctctattgcctggattgccgacttattcggccgatagccataagaatcctcataaaacaatcgttctactacaggttcaaaatacatcttcgctaccatctgtgcaatcctatcttcaactgttggaatcccaagtactctcagcccaccactctttttaggaatggatactgcctttaccggttttgggaaataacttcccgatgataatcgattccacagtttgtatagattatctttcagcttatattcataagcctcaattgattcttcatctactccaaaagttcctttattggcttttacttttagaaatgcttggtaaactgcttgttttgaaatattgtatgactttgtttcttgcataagttcctcctccttaaagttgacttatccttgaaactggataactcaggttcttcgctccactctcgttacaagagcttcttcactactacaacccaatctgcccccatgactgcatcggtactcttttcttgcggggcttccgcttgaaatactcccttgacatcagcccgtgggttcccacgttccatatagacgcctatgttatgttcatgccacctttatgccgcccgccgcctgatcagtaaacaggtttcctccaagctcatcctaggtcaacgactatacccagttttgacggaatttatacgctttcgacacttctgtgggtggttcgtatggtcactcatctccataacacacacctgacaactcttggttgccttttccttaacgctcaataccatagcttttgactacagcaccttaaggtggtttgaaacctccacctgtatggcggtttcggcaggccgtctgccatcatctatacagcatagctgctttgaatagtttatctattcacgcacactttcatggcgcacagtcatcggcgtatcgaacaaatttatgtcctagattttctagcacttgatcaaattcgttcaggtagatgttacttaacaggggagagagattgcctccttggggcgttccttcttccgttgttgtgatgagtccattttccattacaccactcattaagtattgacggatcagttttaggacttgtttgtcctttactttccgctcaatgaaatacatcagcttatcgtgatttacggtgtcaaagtaggctttcatatcaatgtccaccacatatcggtaaccttgttcataataagattttgctttcttcactgcgtcatgtgcgctgcgatttgggcgaaacccataactattatctgagaattctggttcaaatagcggttgtaacacttgattgattgcctgttgaagcatacgatcaataaccgtgggaattcctagttttcttacaccgccgtttggtttcggtatttctactcgcaaaacaggctgaggtttatagttcccttggcgtaaattggatagtaattcctcgcggtgctctttcaagtaaggaagcagttgatcgacggtcatcccatctgcaccagccgcccctttatttctgactacttgaagatacgcttgattgagattattccgctctagaattctcccaaacagattttctacaccatcttgtttcctctgttcaccgcaagaagtgctgcgcacttcatcatacccttcgtgttccacactagctctttgatgatagccaagttttcttgttttctgcggtcgtcgcatcttctcacacctcctaaattattcaagattcttattgttcagtccttcgtaacggtcagtgtcgttactactatgacctcggctgacttctcatgattcaccatcatgtcgccatgatcgttgtgctggtttgttttcattcaacgcccacaacaccctcatgagatctcccccggtaagagtgaaaactttcctcctatgtaactgctagatttactgtataggtttcgggcagtattggactttgtcttgtgatgaagacttatccgacctaattcagccttgtatctagtttctgttcgtcagttcaggagtttgcgtccgacttccttcagccacaacctcacgattgccaccttgtctttcgctaacagttcctactgccaagcctgtagtggactttcaccaccaagttttcacccatgcagggcgcacatcaaaaaaatgagcagaaggtcttagacaccttctgctcattcttttctatcaattaaacttcaaaacgtacacgacggtagcgaacgattgctgctgccatcaaaccaagaccaattacgataaaggcaatgatacccattccaccagttgatggtaacgtaccgcctttagagctattggcaattggtaatgctgttgcgttgttgtaagaatctttgtcgatttcgaaatcaacatcgtcggttaatttttggaacccatttggcgctttgatttctcgaagcatgtagtcaccgtatgctaaaccagttacttcaaagcgtccatctgcatcagaaatgaattttgttgcgtttgcgtagtcttcatttggtccaactggcgtccaagttttagaatctgtaccaactgttaggtattgttctacgccatttacttctctgataacaacgaattccgcaccagctaatccttttgtttcgccatcttcatgtttgaagaattttttaccgccagtgatgattggatcgattggatcatttgttttcacatcatcttgtccaccatcatgattcattgttacagtaaattcgttattgatgtccaagtcgactggtgtttcatctgtgaatgaaacagtgtagtaaaattcaattctttgtccagcatattgacttaagtattgcgctgttgcaggtcccgcagcacctgtcaagttcattgcaatattaaatccagcatagccagtgaacggtgccgctgtattataatagtcatctgttgcattcgctaagaaagtcgctggggtaacagccgtaccaccaatcacgatttgatcaattccttcgaatttcacacctttttgggacacctgatcgtcaagtacaaatttattgtagcgtgtttgctctacaccagcctctgtcaaaatttcaccaatttggcttgggaaggtgaatgatgctttatagttgatccgttttcctacttcaaacgtatagaacgtttcgcctgccggaacaccctctaatgctttacctgcttcatcaactaagatcttttcaggtttttctttatcatcgatcttattttttggatataaatgaatcgtacttagttcatttgcaccatccattgcaggtaaaactagaataattggatttgaataggtagtgtagcctgctggtagtgtttcttcaaaatagtacaccttataaattccgccagctgttcgtttttctaacgtagggaaggtcacattcccgttagcatcagtaacatcacttgctacatttgtcgcatttcctttatccaaaacgaatgtctgcatcaacgcttcggttttcgtttttgctacagcgtctgtttcgcttccagttagccccagcttactataaaaatcttcagtgacatcccatgcggtaaaagttacacctggtaatccttgataatgatcgaactcattcatttctttacctgtgttagctattgctgtgttaggaaattcatccattttctttttatgcaatgttactgatacggtttccccagcagcctttgcattctcgctcagaccaaacacccctgttagtagtggtacgagacatataattgctgttaatagtcctgtccatttcactttatgtttcattattttttccccctatatttttgagtctttttcaaacccataattgctgaaataagtagtaccccgccaagtaatgagtagctttttacgaaatcattcgtttgcggcaatgttttatgcgaagtgactgctgacgctttaggattttctgtttgcttggccacttcacctggtggtacagttgtcaccggatcttgttgttccgcatattttccataaaccatcactttgaatgtttctatattggagtcaatagcgtactgtggaaagaataagacaattggtagaaaacgaaattttccggtttctccgctagctaaaataagatacgccgcatccttattgtcttgatagcgcggaagtaggaactttgcttctccttcgctattgacaactaaaggttcttctcccagtgcttttagatcttgtgttcgaataaagctctgcatttcctccttgagaacatttttatccagcagatactcttttgcttctttttcagacatcgtggtcgaatgacgccagctagttaagtcatagatagtaaagttcaaatgatccgtcccctgaactttctctccttctttttgtcttgtatttattattacttcaactttttcattagatgatgctgccgagacagatgtagtcagtccgactgctccagcaaagattaccagaagagacaagaaaaaaagatgatattttctcatgtttagcccctccttcgatcaacataccaatagatcgcacccaatccactacctattactaggcaaatactcgacgctaatatgaagtaacgattgccaaaacttcctgttttcggcaatgcaccaaattgtcttttatttttcaccttcacagtaatagtattttctgttgaatttagatcaactgagctggttaacaacggatgcgtttctattgaagcaagagcgttatcaaaaatactaatagcaacctctttatccaaaccgatatagttatcaggtgcagtcacttcttttaagaaataattacctggctccaaccctgtaaaagtgaaagtagaacctgtagaaatcgtcttattataagtccccgatgaattcctcaatcggaacgcagcaccttctatttctgttccttgatcattggtctttataaccgttaatttaaattccttcaattcatttacgatcgttttaatcgttgaagtagcaatgacccccgttccatccgttctctctgcaactacaactgtgaaatcgtcacactttttgaagccttccggaacaaatgtttcgcttacacgatagatgcctgcaggaaggttagtgaatttaacaacaccctcattgtcaggtgcaacatcttttgcaacttccagattttttcgcgtttctgtcaaagtaaattttggccgtttctcatctgaaacagtaaatggttgttcattttccattactttcttaaatgaaaagtcggtagtcagcaatcgattcgtgatagttattcctgctgaatctagattactagatgtaaaactctcctgactgtaagttggattggcgtaactcggtactctattcttatctccaattctttcaataactcggtattcaatcgtggaatttccagaaactgctggaaactggttcgtccaagtatttttttcatttaaactaacctcgtgtaaatcaacccattgagtcccatcttttctttgcaagacggcccttacctcttgacgaagtccccagcgattattagcatcatttgaccagacctttttaactggaatgacaaaatcttcattcacagctcgaacagaaggtacaccaaaatctaaaatatctgttgtacggtcaggtgaaacttgtaacgttgtttttccattagctgggtaccatttccctgaaacaaagctggaatcttccgtcttcaaacgtactttataattaatttcaatttcctgattgccataaagattgatattcgtcacttttacttttcttgagttcgaactgtcgactattgccatcctgtcagcatcaatagccttcgtgcctactccattctttaatgaaacatcctttacagttggcgtttcaaccagctctaccatatcgcccaacggatcttcaatcacaccgtgttcaacagtcgtaagcgtcgattcaaaccagtcttggaaggaatcgtcaaaatctttaagatcctttgcttgatagaaatagtaatctttttctgaactaccagtagtattagacctttgagtggtcattttatagagaccttttatcagatcagccggactatgatattctagaggcccaccataagttcccatagcgattgcttgaatttcgatacctgcatctcttagatcggccgcctgtgaattggccatgtctaagtgagagttgatttttagaggcgttccacctcctgcattagtgatagtgaatgttctatccataatgggaggatttaaattactcaaaacataaagagatgtagaaccatttgactgtaaaggatctcccgcttcactggcgatatagttggtgattcttacttgagaaggaaagatcgcaggatcacttttccctgcagtcggtttcctactactattcggtgcgccatcagttaaaagaaagatgacttttcttcgcccatcatttgttgcaagtaattttttttgtgcctcgatcaagcctccttgggtataagtctgatgactttgtgtgctagcagattggtatttcgataccaattgatcccagtcagcatatcgcgcggataaattagaagtgctgattatctcactcccaaatacgacaccaccaattttcagataacctaaattatctggcacattacttttaaactgattgattaccttttttagggattcaacagaaacttcttttcgctgtttcccactaattaaataagttgattcagtgaaagtcatggatgcggaattatccaatacaaacatgacatcaacacctggcttggttaaagagtcacctcggacatttaaccgtacattaaactcatcctccttagcagtttcagttgcatattttcgtaaggcgatatccccttgcgccttttcacctactccgtagtaaatataagagttcttatagttgtctgtagacgtgttccagctttgtacaccgtcccaaacatttgccgctgcgttatcctttccgccttggtgattgatcacgttcgtctgaccggttggctgccaagagtattgtggatattccccattatccgttttataacttggtgccttattcgtgtacgaacttccacgagctaaactactagtcgttattccagataatggtgacagagtattttgttctgagtatagtgaatagctacttacggttggtgaatctgcgtcactagctgaactactggcagactcttttttcgaattttttgaactgtccgttttatccatttccaacaacataggctcagctaatccaagaatatctgtgtcagaaccatttttattttgttcgttttgttcatttagttcgatgaataatttaagtttcttctctttcttaggaagtacgatttccaattcatagtttgctgaagatgtaaattctttttcattcaaccaatcatcttttttttccattccatcgattacaggatactcgattacttgatcgctctctgttaatatttttagctttaaacgactttttttttgctcactgtcagcttctcgtttcatcttgattcgaaaaacatttccttcttctgttagctccgtttcataagaaacgttcagaaaggtctcatcaattaaaacttttgtatttgtttctgcaaatgttcgtgtcctcacacccagcaaacccgtcaaacttgaaaaaatgactcctaatacaataagaaactgcagttttctcctaagcatatttttacctcctttcaccctaaagtaccgctaccagtgttattatcttataagataaaataagtatttacaaatttaaaattaatttaatttttgttatttattaactttaaaaagatgggaaaacacctggtaacacatctattccaatctgtctatcgttattagactcatttcttttaacatcaattaaaaaattgagtattcattttattaatattaagttaatttaatggtttttaatgatgcagtttttttataattgtttaaaaaacgccagtataaagcgatatattagaaaaataagagtatattaagttgtttcactctatttttatatctcgatattaaccatttttctgtctattaagaattaatagtttatatttaccgaccaatacttatatgtaaggggtaaaacaaatccaaatactttatttcatctaaaacgatagttatcgttatttttaatgctttgtatcgttcgattccatcgttacaaaaaccgaaaaaaatgttttttattaaagctaggaaaactcataatagaaaaaatctattatctattcattgcacaattaaaagaggggatgacaaaaataattgccatcccctcttttttgaatattcggcattctagagattctttcaatttgaaacaaatcttaagttaatcgtgaacaagcttttactaaacggtcgttaatctttaagctggtacaaaggagttgtaattactctttgatagattaaaaaagaatcggttcaacggctgtattttcctaaaaacaattagaacagcactggttttgaatctttaaaaagccaaattaacttagtcatcatcaaacttctctcttccttttcctttctgccttaattaaatccctttcaatttttatcctattcaaacgcttcttccactttatttttataactaatgaaaagttcttttcacttggcttaaaacaacagcatttatctactattgtttttgaaattgaattattttaactttaaagcaacctatctagtcaaaatttttccctaatattttttattttctcagtaaattgggtcgctaaaaaagacccttcaagccactattttctcagcacttgaacgatccagtaaatgaacgatagcccgctcaatcaagagcgggctatctaactaatcaatatttgttattctaaagttgagggtgttgactattactaaaaattaactatttctcgtttaaacgatgtattcccaaatcctactaatacatccttgtaaccctttagttacgccagtttgattaaatttcatcaaaatgagttaaagtatcgcataaaaatattttttgtatttttttattttagcatacttttagataattgaagatattaaatcagaatattattcaattctttttactaatttaataactttataggagtaaaacttttcgttcgctgtcactcttgacacttgagaacttctataatgtattgccaaaatccaaaacgcctttcaaagctagtcatctcaagatgctccagatggttgatacattctctaatcttcatcatcagtttttgacttgtttcattatcacctttcttatatattttcaaaatcagccatcatcgttatcaaaaattctttattcaaaaaaattcttatttatctccatgctggatgaatcatctaaaaaaattatattgacattgagcaaggatcattatacgatttatatgaccgaaaaatgtttttggtcatataaatgcaattggaggattctatgccaaaatttagtaagcatgaaaaacaactcatttcacaaaaattattgactgtcgcagaaaaacttttctgtgaatatggattaaaaaaagtaactgtcgcagaaatcactaaagcagctgcaatcgctaagggctctttctatgctttttatcccaataaagaagaactctattttcatatattagtgaattgccaaaaagacatgtggcaaaaaatggattgctacttgaagcaaaatcatatgttaaagcaaagagaattggtaaaaaaaacaatgatttatctgttcgaattactcccgcaatatcctttaatcaaaaaaacagacagtgaaacgatggctgtattattccggaagttaccatctaaagtgatcgaaaatcattctagtgaagatgctgaagccttaaatctttttatggattacggtgttcgatttactcaacctattgatgtagttacaaaggcattccaagcactctatggagtgatcattttattagaaaaagaggatgaagggctacgttggcaagtattgactgtgatgatgaatggtttaatcaatgaattagtggaggaataacgatgattcgtgtagaaaatctcttttatcattatcccaatagcaaaacgcctactttgaaagagataacttttgaagtaaaaaagggggaaatatttggatttttaggtccttccggcgctgggaaaagtactcttcaaaaaatcctaacgggaactctttctggttatcagggaaatgtgtctgtaatgaatcattctcttaaacatctacctgaagattattatgaaaagatcggtgttgattttgagtttccaaatttttacgggaaattcacggctttagagaatttaacttatttttcttctttatataagcaagatcctttagatccacaaccttttttgactcggatgaacctgtggcaggatagaaaaaagacagttaatcgtttttcaaaagggatgaaaacacgcttaggttttattcgttgtttactccataatccagatcttctatttctagacgaacccacgagtggtttagacccatcgaatgcccgaatacttaaagacatggttaaagatttgaaaaaagacggaaaaaccatcattctaacgactcataacatgcatgatgcagaggaactctgtgatcgtgtcgcctttattgtggacggcgagatacgagcattaaatactccaactgcttttcgtcgttctaatgctgttaattgggtaacttatacttttctcaatcaagataatagggaaaaagaatgtcatgtgccactagatgacttgcactctgatcagcatttcttacatctattggcagaaaagaaaatcactcgaattcattctcgagaaaaaaatctagaggatgttttcatttcattaacaggaaggcgattgcaatgagactcctttatacgatcaaaaacgacatgcggtatcaagcaaaaaacggtttctatttcatttatacgatactgacgattgtgtatattttgattcttcgacctatcaccgacctaacgattaaaggttgggctggaagtttgattgtacttagcgatcctgccgtattgggctatttttttatcggcggcatttggctcttggagaaagacgaggatctgcataactacatcagaatcacaccgctgaaaacgacggaatatgtgttgagcaagattatttctttaggagcggtttctaccttgtcagctacgtttatcggtgttatctccttacctttgcagcacccgtttttattagccgcgatcgtttttctttcctcatgcttctttacgttgattggattgatttttgcaaccttcgctaaaacggtcaatggctatttactgaccagtgtaccacccgctcttttacttttaacaccagcgattttatcggctcttggaattgaatttccctttgcaaaattagtccctgggacagttgtactcgaattaatcaacaacattttactcaatcaaacagacggatttttcttttatatcattgagttattgctgtggatcggactgactttttggctggcacttcattttgttcgccgagaaacaggatacggcaggaggacgaaatatgcggcagacacttaaagttttctcgattggtatgcatgttgtcatgcgggacgctatcatgctatttttaatccctgcaccattcttagttggaatcactttttactatttgcttccatggttgaatcagcttcttttagaacgtttcagcttttcatttgaagaatggtatcccctcgcagatggattgatgattattttgacaccgaccttattaaccatgtccagtgcctttttgcttttggaggaatgtgatgaaggacttggcagttattatcagattacaccggccaaacaatttcactatcttatggctagaatcggacttccagcactctggggatttctatgtgcgcttgggattgctagttggtttggtctttctcagctttcgttctccgttatcattgcctgttcatttctcgctgacttattcggcagtagcgttgcaatcatgatcgtagctctagcatcaaatcgagtagaaggtttagcgatctcgaagctgactgggattactatgctgggaatgtttatcgctggttttgtctctgattcttggcgttggttagcaggaattcttccgagcttctggttaggagaattaattttagaaaaagcgctctggtttaatctattgcttggaacggcaagtagcttaatctggattattcttttcactagaagatttatcaaaaaaatcaggtaaacaaaaagtcgaaatccatatgattggatttcgacttttcatttatcctacgattgcgccattaggcatatcagctggtgcttcgacgaccttcaatgtaccgtctggtgcttccgctgaaagaatcattccttgactgatctcgccgcgcattttgcgtggtttcaagtttgcaacaataatcagctttttaccaactaagctttctggatctgcataaaattctgcaattccagacaagatttgacgatcttgcttgtcccccgcatctaaacggaattgcaataatttgtcggccccttcgacttttttacattccatgacttctgcgacttttaattcgactttatcaaaaacatcaaatttgatttccttatccttgactgaaacaagttcggtttcttctggattccatttgatcttttcttcttctggctgactaccttctgacattttttctttaatataagcaacttcttcatccatatccaaacgcgggaagattggtttgccttttggtgtcaccttcgtattttctggaaattctccaaaatgaattgtcgctaaattcatcatgtcagcatttagacctaattgttcaaaaatacgtttaggtgtttgcgtcatgattggctgtaaaagaatcgctacgatcctcaagctttcagctaaatgaaccatcacgctttctaattccgctttgcgttcttcatccttcgctaaaacccaaggctctgtttcgtcaatgtatttgtttgcacgagaaaccaatgtccaaacttctgccaacgcgttgttgaattccattttatccattgcttcacggtaacgactcacgacattcgcagccgttgtagatagttcactatcaaaatccgtcactaacgatttataagctggaacaacgccgtcacaatatttgttgatcatagccactgtacgattcaataagtttcctaagtcattcgctaaatcgtaattcacccgagaaacaaaatcttccggtgtaaatacgccatctgaaccaaatgggattgctcttaataaatagtaacgtacagcatctaaaccataacgttcgactaacatttcaggataaacaacgtttccttttgatttagacatttttccgtctttcatcattaaccagccgtgaccgtaaattttctttggtaatggcaagtccaaggccatcagcatgattggccaataaatcgtgtggaaacgtacaatttctttacctaccatttgaacatctgctggccagtatttttggaacagactgtcatcatcagaaccataacctaaagcagtaatatagtttgataacgcatcaatccaaacataaaccacgtgttcaggattcgcattcactggaatcccccatttaaaggttgttcgtgaaaccgctagatcttccaaacctggtttaatgaaattattgatcatttcgtttttacgtgattccggttggataaattcagggtgctcttcataatattccactaaacgatccgcatacttgctcatacggaagaagtaagattcttcacgcaccaattcgacctcatgaccacttggcgctttcccgccgatcacgttgccttcttcatcgcgatatacttcatccaattgtgtctcagtaaaatattcttcatcagaaacagaataccagccttcgtattcgcctagataaatatctccttgttccaacaattggtcaaagatttttttaaccgctgcttgatgataatcatctgttgtccgaataaatttgtcgtagctgatatccaacgtcttccataactttttgatatctgttgccatcttatctacatactcttgtgggtttacaccaagttcttcggctttcttttcaattttttgtccgtgttcatcgaccccagtcaaataaaacacgtcaaagcccatcatgcgtttgtagcgagcaatcgcatcacaggcaatcgttgtataagaattcccaatgtgcagcttgccacttggataataaattggcgtggtaatataaaatgtatctttctctgccatgaggctcctcctttaaaaatagattcctacgtagtataccacaaaaccatatatggtttgaaaattccatccattaaatggcgctttttttccatttatacccataaaaaagaaagcttgcttagcggtcctttatataaaaattctagaattaaaaattgattcattgaatttcaagtaatttttaatgagaaaacttgagtcaacatgacggaacctataaagaaaatactacctaatagcggtttgatactatcttgttttatctagtattcgttaggtgcggtaaaaatgcgataaggcttttttgatagtaaatgtaaccctgttttccctctttgcgcttcccgtcaattgatactccataactattctcagggaaattgatagtctgaacacccttttcaatatggatcgttcacagaaaacgccccttagcacttgcagaaaaacgcttgttccatttgctaattattataagaaatatagaacatcgagattccaagtaacacaaaaatgatccttctcagtctattgatcactcgccactttcgatccattacaaatcctgatttcttatttaactgcacgtagtttaacacgacagcattcaataaaaatgttataaaaaaacagcgaatccaagaagactcgctgcgacaattatttccgtaagattttttccatcttcttacctttagctaattcatccactaatttgtccatataacggattttctgcatcaaaggatcttcaatatcctccactcgatagccgcagattacacctttgatcaaagaaacattttcattcaattctggagcttcagcaaaaaaagtttccatatcattgccagaatcaatttgcttttgcaaaccttcttcgtcatatccagtcaaccaataaataacttgatctaattcttccttacttcgaccctttttttcgatctttttaaggtacagcagatagatcgaaccaaagctcattttaaatattttactcatttgcgaacctcttctctaaataaaatgcaaagcgatcgtaaataaacacgtgagtataatcgtaactattccgagaatcttcatttgttttagttcttttttgaatttttcttcattgccttttaactgagcaattttccctttaaatacgcataacgtaaaaaagtttgttaatgaagccgcactgataaaagacacggctccagtattactcatttctggaagtgaatacatcatgacaatcaaaagaatcgcggttaagacaggtcctataaagtatacccatgacaaatttacaatttcttctcttcgtttaatttcattcactacagttgaatcttctaataataagtcatctaacgaaacatgaaatacttttgccagacgcaagacactttcaatatcgggcacggtccttccggtttcccaatttgaaatggttcgtttcgatacaaaaattttatctgctaattcttcctgtgtccattttacagtttgtcgttccaatttgattcgttgactgatttccatctgttcaccttcaatagttgaatttactactttcaaactatctgatttgcgaaaaactgtcgagagaaagttctttccacccttgatatgataacatttgcgttaacgcgttacaccatctttcctagctgcctcggcgaccttcatggtaatcaaatccactaaattttcatcaaaagcagagggaatgatgtagtcagagttcagttcgctataaggaatcgagtctgctattgcatgtgcacaggccaatttcatccgcgaggtaatttttgtcgcttcagcagtgaatgctcctcggaacaatcctggaaaagctaaaacattattaatttgatttggaaaatctgaacgacccgttcccactactgaggcgccaccagcgatcgcttcggcataagtaatctctggttctggattggccatcggaaagacaatgtttccgtcattcatagacgcaaccatttctttagtaactagattaggcgcagaaacaccgatgaagacatctgcccctacaaaagcttccgccatcgtaccagaaaaatcttttggcgcgatcaattctagtatctctttttctacaaatgtcgcattcgccatctgttcattcaaagcgccatctttattaaacgctaggatgtttttcactcccagatcaattaacatgtggataattgcactgccggccgcgcctgttcccgagatcacgaccttcaaatctttcgcttccttcttaaccagcttcaatgcattaattaaggctgccgtcacaacaacagcagttccatgctgatcatcgtgaaaaactgggatgtccaatgcttcgatcaaggcgcgttcaatctctacacaacgtggggcactaatatcttccaaattgattccgccaaaagtaggcgcgatcgctttaacaatttggataatttcctgcggatcctttgtgtttaaacaaatcggtacagcatcgatgtctgcaaactctttgaatagcagtgcttttccttccatcaccggcaaggcagcctctggtccgatatcccccaagcctaaaacagctgtgccgtccgtaacaaccgcgacactattacttttccaagtatagtcatacgctttatttttatcttcggcaattttccgacaaggctccgctacccctggcgtataggctaaagataaatcatctttgttgtggactttggctttgctagtaacttcaatctttccatgccatttttcatgtgcggttaaggcttcatcataaatagtcatcaacattctctccaatcattttttccggacgaacccagttctcatattcttcctctgtcacataacctaacgataaagcagaatccttcaaagtcgttccctcgttgaaagctttcttagcaatttcagcacctttatcgtagccaatatgcgtattcaaagccgtcaccagcattagagactgttccaaaaggtctgccatccgatcctcgtttacaaccaatccctttaagcatttatcactaaaggaatgcagcgcatctgtcagcaatcgaatactttgcagcaggtcaaaagcaatcaatggtaaataaacattcaactcaaaatttccctgtgaggccgcaatcccaattgccgtatcattccccattacttgtactgcgaccatcgctaacgcctcgcactgtgtcggattaaccttacccggcatgatcgagctcccaggttcgttagctggcagggtaatctcccctaacccactacgaggcccacttgctaaccatcggatatcatttgccattttcatacaattcgctgccaatgcctttaacgcgccgctaacataaacaaccgcatcgcgattggctaatgcgtgaaacttgttagtttctccgctaaattgaatcccagtctcttcgttcaacgcttcaataaatgctcgctcataagctttcgatgcattcagaccggtcccaacagctgtaccgccaattgctaactgtcgcaattctgttaaactattggccaacatcgttgcattatgctctagggatgaacgccaaccgctgacttcctgtgcaaaggtcactggagtcgcatcttgtaaatgcgtccgtccaattttaatcacatgctgattcttttcttctaattcttttaatacactgaccatctcatggattgccggtagtaaagttctctcaatagcaaatgttccagcaatgtgtagcgcagttggaaaaacgtcatttgagctttgagacatattcacatcatcgttcggatgaacagtcaaatccttttgacttgccaaatgagcaatgacttcatttgcattcatattactctgtgtgccgctgcctgtctgccaaaccaccaatggaaattcatcccagttttcaccttttaacagcagatcagcggcatactgaatcgccaatgccttttccgcagctagttttcccgtcctctgattggccacagctgccattttttttaccaatacaagagcacgcaataattccggtggcattttttcaccgccaatcttaaaattttggcgacttcgttcggtttgcgccccccaccaagcctcttttggcacttcaattgggcccattgaatcatattccgttcgtgttttcatacattcgactccttgtttatattaggaggaactgaaatacttattctcctattttgtacaattatctcttatttatactgaaatggatacaaaaaaagtacaaaagcgatcaaacttttgtacttcgttcgttatttatctcttgtgtcaaaaagaatcgtgacaggcccatcattgattaatgctacatccatatcgccaccgaattctccggtttcaacgactaaccctgctttgcgtaggccttcgttgaaatattcatataagggaatcgctgtttcagggcgagctgcctttacgtaacttggtcgattcccttttttcgtatccgcatatagtgtgaattgtgaaacacttagaacgctgccgccaacatcctgcaatgactgattcatttttcctcctgcatcttcaaagacacgtaataaagggattttgcgaatcaaataatccgcatcttcctgagtatcctcttcatgaatgcctagaagaatcatgaagccgcgaccgatcttgccgacaacttgttcatcaattgttacacttgcctcactcacacgttgaataactgctcgcataagaaacctcctaccctttcgtccgtttcacactgtagacatctggaatggtcttgaccttatcaacgattgaatataaatgattcaagttttgaatcttaaaggtcaagttgatgacagccaatcgatctttggttggttttgcttcgacgctaaccaattttttagtcataccgctaacgatattcaaaacatcgtttagcaaaccatcacgattgaagccataaatttccaaatcagcattatattcttggactgaatttgtcgtatcttcccattccacttcgatcaaccgctgctgaatatctttttgcttcgtaatattcggacagtcggatcggtgaatcgagatcccgcgacctttagtgatataaccgacgatattatcccctggaacaggattacaacaatgactgatccgaatcaataaattgtcgattccttgaatgacaataccgccttcatgccgtaccttgattttttcaggctctttgggattattgaccatctcatcaacagcatcacgctgtttttgcttcatttgttcccgacgttctttttcggttagacgattagcaaaggtcaaggcgctcatttcaccaaagccaatcgctgcatataaatcttcttcactgtggaaattgaacttgtccagcacatccgaaagcttgtccttcgtcagcatctccttcggtacaaagcctagatcattgatgcatttaacaactgcatcatgacctttggtaacattttcttcccgatcttgagttttaaagaaccgtttgattttattttttgctttactggttttaaccaaatttaaccaatcacgacttggaccaaaggagttagccgaggtcataatttcaatgatatcgccatttttcaatttataatccaactgcaccattttgccgttaaccttggctccagttgttttattaccaacatcggtgtggatactgtaagcaaaatccaatggtcccgaacctttaggcaactccgtcacatcacccttaggcgtaaatacgtagaccttatcactgaagatatcgcccttgacgctttccataaattcagacgcatcgtagctttcatcctgcagctcgatgatctcacggaaccaatccaactgcttgttatcttgtgttgtttcctgcttatcagtcttgccttctttgtaggcccagtgagctgcaaccccgaactcagcgatttgatgcatttcatgagtacgaatttgaacttctactggattgccgctcggtccgatgattgttgtatgaagcgactgatacatattggcctttggcatcgcgatataatctttaaaacgtcccggcattggtttccatttcgtatgaatcgcaccaagcacagcatagcaatccttgatcgaatccacgattacacgaattgctaacaaatcatagatttcatcgaattgttttttctgatctcgcattttgcgataaattgagtagatatgtttgggacgaccatagatatcgccttcgatccctaattctttcgttgcttctttgatttcttcgacagcttcggcaacaaaaccttctcgttcatcacgtttactgcgcatcaaatgaacaatccggtaatactgctttggattcaaatagcgtaatgcggtgtcttctaattcccatttaatccggctcatccctaaacgatcagctagtggggcatagatttccagcgtttcgcgggcaattcgacgttgcttgtcatcacgtagatatttcagagtccgcatattatgcaaacgatcggctaacttgaccatgatgacgcgcaaatcctgcgccatcgccaacagcattttccggtgattttctgctaattgttcttcgtgagacttgtatttgattttccctaatttggtgacgccatcaactaacgaagcaacatcttcaccaaattcaaccttcaaatcctctaatgttacaggcgtatcttctacaacatcatgtaaaaaacctgtcgcaaccgtgtgagggtccatatgtaagtccgctaaaatccctgcaacttggatcggatgaataatgtaaggctctcctgatttgcgaatctgaggcttatgggcttcatatgcaaagtcgtaggccttttgtacaaacgccacgtgctcttttcccatgtacgtactaaccatcctgatgacgtcaggaccggtcaattcaacttcttttgccatgtgacgttcccccttgttttctgaaaatgattgttcttattatacaaactctcgtaagctttttcaatcaaatcagtgttgtagttcataatagaaacttgccgcgctcaaaagatagaagggcgctgtttctgttcgtaaaattcgtggtcctaaaccgcaaagctttccgccagcttcctgaaaattttcgatctcttttggagtcaatccaccctctggaccaaacacgactaataatttttgtccagaagttaattgttgaaatgtttgaactagctgggcttgctctccttgcttggccgattcctcgtaagcgatcaaaacagcgtcataatcagcaaaaccagcgatcaattccttttctgaagcaaatttcaccactggtaaggcttgacgatgggattgttccgctgcttcttgcgcgattttattcaaccgctgctgttttttttgctgcttcttcgcatcccacttagctaccgaactctcaccaggaaaggcaataaaatcatgggctccgagttctgtccctttttggacgatcagctccagtttttcccctttcggaaaaccgctggcgatcgtgatatcgatcggtaattctcgttgtagtcgctctttttcaacctctttcaacgtcaccttatcattatcgatggcgatgattttcgctttaatcgcagtttgatcattgaatacgagaaatacttccgcgtcgaccgtcatgcgcatcacacgcgacatatgatgatgcggctccccgctgatttctacagttggttcatatgcctgatctaaaaaatagcgttgcattctagtcttcctctggtttcttcaaaataatcgcgaaccaatctttttgttggaagattcgatcaacttcaaaaccttgcgtatacatttcttccaacaccatatcttttttatcttcaatgatgccggaaacgataaatgtcccatctggttttaataaacgccaagcatcttcaatcatcaaaacaatgatgtctgctaaaatattcgccacgatcacatctgcttcttgctccacgccaactaataaatcattggcagaaacgtgaatattttcagtattcgcatttagatcaacattctcttgcgccgaacgaacagcgacttcgtctaaatcataggcatagatatcttttgccccataaagcgaactagcaatacttaatacgccagaacctgtgccgacatccaagactgtctcaccaccgcgcaaaacagtttctaatgcttgcaaagtcagattcgttgtcggatgtgtccctgttccgaaagccattccaggatctaatgtaatgattttttcatcttcatgttgggcttcgtatttttcccagctaggtacgattgttaaatagcgggtcacccgaacaggatgatagtactttttccaagccgtcgcccaatcgctttcttctacttcactaacttccacaatatttttaccgatgttcaatccaaactcgggtaatttttcgatcttcgttttaatgaagggcaaaatttcgggcaagaaaatcgtttctggaaaataggccatcacaacggcaccctctgttagactagaaaatgtttccttatctaaaagttctccgtattgatcttcttggtaattctcaaagtccaacgcatcttcaatcgcgacacccgatgcgcctgcctccattaaaatattcgaaacagcctcgaccgcttcgctttctgttgttaccttgacttcattccacttcatctttttacctccttattcatagtaaatgggctaatttcatgccgtatgtcattcctctatacttcattatattttgactgattgattaagaaactgaaatccttaataacttggatacggcaaataactgctgtcagttggtttgattaatgccttaaacacagcatcgtcccatttcatctcaaaaatcgcatcctcgctatcatcagctaagaaatccaacaaatcgctttgaccctcttcaatgacctctttcaaataatcgacaactgccgtcaaatcatttttcttcatgcctttttttccttcatacgggattaccgctaaaaaatcctctgaatcgtaggtagatttttcaggatcgactaataagatcgcatcttcaaattcaataatctcttcttctgaagccactccatcgacatcatcaagctcgatctgccccttgttttcaccataaattcgaaaagcaatctcgaagctatgattgcgtgtatcccagtccagtgctaattcataatcgggaattttcttgtttaagtagttatctaaataagtaaccatggtctcttttgccattttcagttcctccatccattattttcttctattaaaagctttcgttgtttggttatgtaaggattgccatgaacgacaaatcgcaaaggcctttccgtccaaatccttttgttaggtattccaatacgcggaagtgcatcaatttgtttaggaacacgtcttttttctggtactaaatgcagtgaactagtaaaaattgattcgccgtataattctcgagtaatccctaatgcttcaactagttttcctggcccatctgaaatcatcgcgccggttctgccatgacgattctgaaccatttgctcaataccttctactggctcaaagccacgaatcatcactccttgcggcattccttccggttgtgtgatcatgttcaagatcaaatgggtatgcatcgtatataaatagattgtccccggtttttcatacattgctcgcacacgctgtgtatctcgcataccatagctatgcgctgcctcatcatcaggacctaaataggcttcacaatctacaatataaccgcctagtttcccctccgatgtctcatgctctaaatacatacctagtaagtatttagcgatattctccgttgattctgtattaaaatagttaattacttgctccattttcctcaccttctacatgatacacaataatcctgccgcatgctacgcccagcaatcaaaactcagcaaacacaaaggaaaaatgctataatgggaacgtatatttgccagttctgctttaatagattagtaaattggcatggctacgaggatccaactatttttctttttttgaaaaggttattcttatcaaaagctactgccagttttgatcatacatattaataaaatggaactattactaaaaggaggttccctatgcaacagcctttagcttatcgcatgcgtccccgcaatttagatgaagttgtcggtcagcagcatttagtcggtaccggaaaaatcattagacggatggtggatgctagaatgctgtcctctatgattttatatggcccacccggcactggaaaaaccagcattgccagtgctatcgctggctcaacgaattacgcctttcggatgctaaatgccgccactgatacaaaaaaagatttacagattgtcgctgaagaagccaagatgagcggcacggttattttgctactggatgaagttcatcgtctcgataaaacgaagcaggattttttgctgcctcatttagaaagcggacgaattgtcatgatcggcgctacaacagaaaatccctatattacaatcaatcccgctattcgtagccgaactcagatttttgaggtgaagcctctagatgaagaggatgttattacagcagtcaaatcggccttggacgataaagagcgaggattaggagaatacccagttgaattggatgaggaggcattaaaccacttagcccgtgcaacgaatggcgacttgagaagtgcactgaatgggttagaattagctacgaaatccacacccaaaaatgatgagggaaaaattcatttaaccttatccatcattgaggaatgtgttcaacgaaaagcacttactcatgacaaagacggtgacgctcattatgatgtaatctccgcttttcaaaaatcaatccgcggcagtgatgtcaatgctgcattgcattatttaggtcggctagtcgaagcgggggaccttccgattatttgtcggcgcttaatggtgattggctacgaggatatcggcctagctaatcctgctgccgctgcccgtacggttcaagccgttcaagcggcggaaaaattaggctttcctgaagcacggattcctttagccgatgccgtcgttgatctctgtctatcaccaaaatcaaattcggcttacacagccttagatgcggcgatcacagatattcgaatgggaaatgctggtgaagtacccgatcatctgcgggatagtcattataaaggtgccaaagccctgaaccgcggcgttggttatcaatacccacacagctttgagaatgcttgggtggatcagcaatatttaccagacaaaatcaaagatgcccactattacgaaccaaaagctacggggaagtacgagcaagcccttggtcaacaatatcagcgtatcgaagaatggaaaaagaaaaaataagacaaatactacatttcccaaattgaaaagactttaattaatccgtcaaaaatcttttcttctattcaccaaaagatcaaaataaaataagcattttgttttgacaaaatcgcttatttttttatacaatgtacctatagaagacgtgaatgttttggatgacttctcatttacagatataagccacttcgttgcgtctcaataatgactgtgctatgattgagatggaaattctgtgatgtgcgcgttgcctatttcagtgttgaccgaacatttttattgatatcttgggatctgtcttgtgtcaaagttggtaacatgcctttacatttggtagttcaatgcttagaccatggaacccacctgctgtatcttgcgggatcaatactatcgggtgaataacggcatcgacggaattttccattttttatggagtgaaagcaatttgcgtacgcaaattgctttttattgtataggaggaaaaaagatgatccgcattttattatttttactggcacttatcctattattttgcagctattatttgatcaaaaaacctcagggattgctagttctatttagcgaggaaaaacaaaatgagtcccgtagctttttacgccaatttggaattatttatgctgtcttagggattatggcgattttggtcggtttgattaataaccgttcttattcgatgatgtatttgatcttacttttggttgtcgcagcgatctttgctttattgatgggctcaaaaacaaaaaaaggttaacagtaccattttcaagacttttgttttaaaataataggtgagaagatagtatatgacttgtatttaagttctattttttctagaaagaaaaataaagactttaaaacaaaaaagggagttgggaacgatggatcaagaatatagtaaaatcatggtggcagtcgatggctctaatgaagctgaattggcgtttaaaaaagcggtaaatgtcgcaaaacgaaatcaggctgaactattactagctcacgtcattgatacacgagcgtttcaaacagtttcttcttttgacaatgttttagcagaacaagcaacagatatggcgaagcaaactctagacgattatgaagctgaagcacaaaaagccggtgttaaaaacattagcaaggtgattgaatatggcgcaccaaaagtaatgattgctaatcaaatccctgaaaataatcaaattgatttgattatgcttggcgcaactggtttgaatgctgttgaacgtttatttatcggttcagtctctgaatatgtcattcgcaatgccaattgtgacgttttaattgttcgaacagatttagacaacaaagttcctgaagaagacgattaatattaaactaagcgggtgtgctgattagcatacccgcttttgcattatattattttttaaattcagattattttagcatagacttgtaaagatcaatgatctcttctaatgtagcatcccggggatttcctggtgaacaaacatcacggaaggcatcttcagcgattttttgcacatcctcttccttcataccaagctcagttaggctttgcggaattcccacgtctcttcctaattgcttcacggcttggactgctgcattacgaacttctgctaatgacatatctaccgcaccttcgacgcccattgcaacagcaatttcacgatatttttcgccagtgtattctttattgaaatccataatcaatggcaagagtgtcgcacaggcgacaccgtgaggagtatcataccaagcagataatggatgcgccattccatgaactaaacctaaccctacattagaaaatcccataccggcaatatattgacccaacgccattttttcccgtgcttcttgatctcccgcaactgaatctcgcaacgcatgtccgataatcccaattgctttgatgtgaagcatgtcgctcatttcccaagctcccttagtaataaatccttcgatcgcatgagtcaaagcatccatacctgttgcggcacataatgctgttggcattcccatcatcatatcactatcaacaaatgcaacaatcgggatatcgtgaggatcaacacaaacaaatttacgttgattggtcttatcagtaattacatagttaattgtgacttctgcagctgttccagaagttgtcggcactgctaaaattggcagagaaggctttttcgtctcagcgactccttcaagactaattacatcagagaaatcaggattggtcataatgattccaatcgctttggctgtatcaattggagaaccaccgccgattgcaacaatataatctgcttccgccgcttgacaggctttgacacccgcttgcacatcctcaatcgaagggttcggtacaatgccgtcaaaaatctcgtaactaagctctgcttcatctaaaatcgctgtaacctttgtcgctacatcaaatttcaataaatccttatccgtaacaactaatgcctttttaaatccgcgcatcttagcctcattcgctacctcttgaattgctcctttgccaaaataagatgtttcattcaaaatcattcgcttcactgccattgtattctctcctttattgtgttttatttcacagctgattatcccacagcaagaaaacgttttccatgacttctcattataaatatttgctgtaaaatgtgacgtacttaactatttcttaaataatatttttcatattgatggataaagtcattcgcttcgttttttttcttgaaaaatattttttccttttttacctctgttcgtatgttgatacaaaaatattgattgaccctttctagttgcactcccattattttttttataggaattaataaaaactgaccatccgtcaaatcaaacaataggaaatgctgtgttcctacgatttgaccattattcgcaacaaatttccgttgttgcttaatctcttgaatcaattttttatctaagtattcaacatcagaaaatttctgcacatcaaaatagttctttaaatcgtacatgatctgattctcactcaaactattttttctctttttaagaaagaaaaaaacgacgaaaactagcacatacagtcctaccaccatttgaacatctttgatttgcagatttttttcgatcagccacccattgatgagatacatcaataagatcatgaaagctcctttaagaaaaaaattcagttgattgagtgtcttgtctaacgttactttgcgcaacagaattccttgatttcccattctctactccttatcatttatggttttctaactggaaataattccgtatgtccttctcataattcgcatttttcatcgctgaaataaaactagggattttagctaattcataaaggtgagtcacagccttgatatgactcttcttatcctttggtgcaatcacgacgattaaactaatcgaaatattttccgcaaaagcaattggctgatccagttttaaaagagacattcccactcgatatacaccatcctctgggccagcatgtggaatcgccaagtctggtgaaattacagaatagggatattctggatcgtaatgttcaatcacagtttcaatatattttggagaaacatagccttcattgaccaaaggtttgcctgcaatccgaatcgcttcctcgacagatcgaacactaggataaatttgaatatgagaaagaggcaatagatccttcaaatcagggttctgattttgagcattcacaccttcattgatttctgttgcaagtaaacaatcttgtatttctcgcgttaattgctcttcattaataatttgggcattttttttgataattgacagtaactgttgaacaacttcacgattttttgacagcccaaatgtctcatcgaaatcgatacgtttacgtacatcgctgatcaaattcatcttgtcttcatccgtcaaaaaatgcgggattaaaaaaacttcctttttagtattcaccggaactgttgaaaagacgacatctccaacgttatgaccctcttcataaaattctcgcaaagacatattgcgtacaaattctatcgtcgtaaataattgctttaattctcctaataatagttttgaaacggatactccatgttgacaaaccaccaccgcccgaatttttcgccttttttgtttttcaagctcttcattgataaagctcaaaagaataactgatagatagattaattccccttctggaaaaataatctttaaatagtcctcaataatcccgattgattgatgaactaacggatgaatgaagtcataattttcaacattatctaaaaaaagcagatcattatccggcaaaccgaattttattcgataataagccggaataatatgctgatagattgcttcctccaactgacttttgtttttgatatcggtaattcctaaaatctcaaaactattgataaaagattgaatccgccgcatcaattcctgatctttataattcgaacggattttgatcagattggtgcttaacagctggatcgaaataaaatgaatttcaattaaataattcgaacccttgaaaaaaggtttcaacgcttggcaaacttttgaataaaaatccttttccaccatttgaacatagttgcctaagactcccgctgacaattcattcccttgtccgaatcgaacggaacacatgtaacttgtcagatagagatcaattagtttgaattctgtaaattctaagcccaactcatgctctaacaaatggattcttttttttatttctgctaaagtttgacttttgattccaatcattgccagataataatcaagattattttttgacttttctacttcgcgaatgaatttgattcctaatcgacgaatgtccatctcatttcctgaaaaataaaaacctctttttctggagaattgtaagtcaatgtccaacggtttcaaatgattttcaattagcttccgtttatcgcttaaaatagtatttttactaacaaaaagtttttcagccaatgttttcagtgtctcgccctgatgaagtaaaacaatcagatagagataacattctcgttctctatctgataagtggattgacggcgaaactttcgttaaatagctttttatcgctgcactctgaccatctaagagaaaaaaagatccattctttttaatttttcctaattttaaatcagctaattcttgattgacctttttgattcggtaatctaactgccccttagtcaaattaaactttttttctaaagaaagtgaggtatgactgccttttgaaagaaataaatctaacaattgaatcgccgtaacatccatttttaatcctcctcgttttgaatcattttttaagcacgaatgagcatatcactcctacctctttcaaaataatcatttaagacatctcgtaacaagtaaggcgaacgtggaatagcatcaatcgtatctcccgcgatatgagaggtaataattagattatctaaatctagtaatggatcatctgctcgaatcggttcttcccaaacaacatctgttgcagcaccagcaatcatattcatctgtagcgcttccacaaaatctgctttattcacgatatctggtctagcagtattaactaaataggctgatggtttcatcattgaaagtaaatcagcgttaatcatattcttggtatctggtgtcacccgtacatgaagtgaaacgatatccgcggttttaaacaattcttctaattcgacaaaggttattttcaatccttcttctcgtattttttcttggttcacaaaaggatcataagcgatgacctcgactcctaagctattcaatcgttttactactaattttccaatataacccaatcctaccaaaccaacctttagattagccaatgtcgttttatagggatcgttaggaaatttcttgggccattttgcctctttgacctgttgataagaaaatgcaatatttctggtcaacgcgtaaaacaatcctaaagtaaaatcagcgactggttctgcattgcgaataacatggattaatggaatctgccttttttttaattcctctacggcaacatgctcaatgccaccacgacaagtacctactaatttcagtcgaggtgctgcttcaatcatcgcttttgaaacgggagcgatgtgaacaagtaaataatccgcctccttcatatcatccagaattccagctggtatctcaactgattcagggcctttttgctcaatcaatttgattttctcttggaattgctctttatttaaatcagcgtaccaatgatacttcgttacttctaccggttcttcaatgtttagctccaacgcagcttcggctagggtttcagcagaaactaaaccatctccaacaacaacaacttttgtcatttaaacagccgctccttccttagacacaatgccggcttcttcctccagcttcgccatattttctaaatatgcgtgaatcgattctttttttgctcgaacaaaaagataaagcacaatgtagaccacaacagaaagaccaatccaaagcggattttgtgtcataaatatcaagaacaagattcccatgatatggttcgtcattaccgcaaaactacagatcatcattgctccttcaggcaaattaacacccacatcaacagctacttgtgtaaagataggtactactgcagtaataatatatagccctccagcacaccaaattgctccgctgattagtgatttgaaaatatttccgttagaaatacagattaccagctcgatcatgtaagggattgcaattaaatccaccatcggcaaagtctgatttccaggtaaaaagatcgccaatagcaaaacaattgggatcaatagcattcctgttaataaggttgctgtctcaccgtaaccggcggcatcattgattgccaaataccaaacacggtccttgcctcctgaagttttcgcagtactttttgacgcatctgtgatcgccgtaaatgctgacgcaaaaatcccggcgatttttggaaagattgccatgatcgctgaagttgagataccgataaccatgatttccccccagccagtcaatgaacctaaacgcatgaagttcccagcaaaacctaatgccaaacctaaaatgaaacctaatgacgttggttctcctaaaaaacctaatttgtcttgcaaagtttctggattccaacgtaccttattcgcccctaacttggttaatatccagtccattgccatggctagtggtacggaacaaatgtgatgaggcgcgctcattgtacagcgtgggtaaccgtaataaaccgaccagcgtttagcaacgatttcagtaaagactaaacaataaagattagaaagtaccattaaaccaatcgacaaccaaagatttttagtagaaatatagagcattgatccccatagcatgaaggagtaattattccataaatctgatggcataaaaatatctgtaaacttgataacaaataaaatcgcctgcagtgctaaccctaaagctaagaaaatcatccctacttgggtcgaataggccacgacacttgtagcttgccaaccagtatcaagaatccttagattaacgccagtttcttctaccattcgattgatggctggggtgacgattggtgtgtaagcaccaatgatcatattaaacccagtcaatccgattcctgcgttcaaggctgcattaaaagcttttttgggctttaccttcatcagcaaagcaataaagaaaataattactggtactacgatcgccgcgccaaaagcatccataaccttcgataaaacatctaacatgtcatttctcctctctttagtttactaatttctcagaagtctcaagtagttcgtcaaagaattcctcttctcccataccagataataaaccaactgcattgatcgtcggtaagtcatattttccttttaaaggacttgtgtgaacgatcaaatcccaagaaccgctagaaagctgatcttctacacctccaggattcacttcaactgtttttgctttaattccatgatcatccaaaaaatctcttaccttgccagccaccatcgagcttgttactgttcctgagccacacactgaaattacattcaatcgtttaaccatttaatctatcctcctacttttttatcgacttcgttcttctaaaatccctgctttgggagcaaccccaaactgatcagctaaatcccataattgatcacttgtaattttttgcctgaagccccctggtacttgtactactctcatataaatatctgctgctttttcaactgtttcaaccaacccaaatgcgtcatccattgattgtcctgctcccatgatcccgtgatgtggccaaattactactcgtgaatcatgcattttctcagcggaagccaaccccaattcaaccgttcctgccaccatccagggcaaaacagaaactccatcgggaaagacgactagacattccgttatcatttcccataatgaacgtgtaaatttcttttcatccagatcatgaatgaatgtcatcgcagaaattgcaatcgagtgacaatgtaaaattacccgatgatcagggtcgtgtgctagtcgtaccgcatgacattttaaatgtgaggctaattcgctagttggaacacctccatcttctagtccccataacactttaaacctttttccgtcatcagaaatctttacgatcgctaagtttttcgctggatttttgcaaatatttttgaaatagcttcctgaagcggacactagaaaaattttccctgccaattctttaacctcaaaatctagatctttttctttaatcacatgatccaaatcaagatacaggcaaacttcagcttcgtctaacatatagctgatgttgccaccgttacgttcatcccatccattccgccataaatttttggttacttcgcacatttcttgaataaagggtgcttcataaatatcatgaattctcatatctcacttctcgctttctgttttaaaaaattgtgtaactatttttaaaatttctgattcactggactcttcttccaattgcctcataatatcttgatccataaacattgccatcaaattttgtaacagttgcaattgatcttcgcccttattaaatccaagaaaaaaagcatatcttgcatttacaaactcatccgtcgttcccatttgaccaaatgttactgactcacccaatttgagaatataaataaaaggctttttaatgtggcttggatcagtatggggaattgctacggcaaatgatggtgtctgtaatccagttggatattccttctctctttcttttaaagcctcttgataagtcgtttcgataaatcccagttctgctaacttctttgcagtataatcgattaatgcatcgaatgtacctgtcccctcgtatacatcaaccaattctgggaagaacatcttatccgcaatgatcatccgctatcctcctttcctaattacatcgtaagtttagcatccataaaaaataatagtatgcgctttcatcacaaaaaaacttattctcttaaaaaaactgtgacgttcttaataattactttgaggaaggcttatagcgaatactttccgaaaaaaaaagaaccgcagaaattccgcgactcattttatagcttcgaaccaatgacaataccaataaagcttaatagcatgcctagtccgtaagatccaaacagataacgataaaacattgagcgatcatttttccataaaacaaataattcaaaattgtaggtagagaatgttgtatagccacccatgatccctgttcctaagaagaggtagattggatcagacagatgcattccgaagaaaatccctaacaatagactacctgtcaaattaataaaaaatgtcgattttggcaggcgctttgtttgtggttcaaaataattgtttaaagtaaagcgcagcatcgcaccaattgctgccccgcttccgacaagcaatgtctcaatcattaatccgtcacctttctatgatagatcatttcacctagtacagtcatggctaggccaccgaaaaacgatagcaataaatagataaacgccaagccaatttgatctgattgcactaatttcattgtatctaaagcaaaggatgaaaaggtcgttaaggctccgcaaaaaccaacgccaactcctaatactaaacgggcagaaacatcgatatcactcaaaatatgcttcacgagccaactaaaaatgaaacatcctaataaattaacgagcagcgttcccaaaggaaatccactcacggcaggaatccatacgcctaaccaatagcgtgcagtaccaccaataaaagcaaaaaatgcaatgactaaatagtctaacatgttgttcatctccatttttcattctttctcactataaaacgattgatatgaagttgcaaataatttttttcatctactatttacaaatcatgctaaactaggactatctttgaaaaaatgggggatatatatgaagggtattatttttgatttcaacggaaccatgttcatggattctgatctgcatgaagcagcctggctgtatttgattcaaaaatattcagataaagaaatgacagaagaggacattttaaaaaatatccatggcaaaaccaatgatgtgatcctacgcaggtttatttcagaagacctaacagataaaagggttcaggaattgtctgatgaaaaagaagcctactatcgaaaatctgttttagaaagtcctgatcacaatgattttactaaagggttagtaaatgtattagattatgccgcagcagaaaaaattcctatgacgatcgcttcagcctcacctttagtcaatatggatttctattttgactatctaaatttaggaaactggtttgactacgaaaaaatggtttgtcacactgggcgtttccctggtaaaccagccccagatattttcttgatagcagcgaaaaaaattggggttaagccagaaaattgtttagtaatcgaggattcatactccggactacaggcagctcacaatgccaagatcggtacgatcatcgccattgatccgagtgggaaaaaccgcgctgtttttgaagcagagaacttagctcaaaacggggttattgaggattttacgacatttatttcagattatctaaaatagaagaacctaaagaaaaaccactctcaagaaccagatgataattctgctcttaagagtggtttaatttagataatttttgctcctaaagtatttttaaaatgattcaacgcccaggtatgtccagtcgcatcaaaacttgccacagctttttcaggaatcactatttgatagcccaaattataagcatctaccaccgtgtgcaacacgcaaatatccgtacatacaccggtcagacaaagttctgtaatcccacgttcccgcaaacgtatgtccaaatcagttccgctaaaagctgaataatgacgtttgtcgatccaatagacatttttctttgttttgtttgcttgataaaagtccgctagtgatccgtataagtcacgtccattcgtaccaatcacattatgtggtggaaaaagctgattttcaggatggtattgatcgcttggatcatgaccatcaatcgcaaaaacaatgaagtctccctggtcaaaataatcttttgtcacagacactaattcttgttcgatagcctggcctgcttcgccagtcgttaatttcccatcagttgcaacaaaatcattggtataatcaatcgaaagtaatgcacgcatgaaaatttccccctctaattatgatagacagatttattgatcgtattcttgcagtctcattttctaaactaggtgattaacaaactcaatcactaattgtgctgacaatgtacctgttcgattaacaaactcttcgtgagtttcagtagcttcactatcagcagtatcactgatcgcccgcacgatcaagaatggtattccaaattgagcggccgtatgtccaattgccgccccttccatctcaacagctaacgcatcaggaaaagctgcttttatttcataaatttttgatggactgctaacaaaggtatcgcctgatacaatcaagccgacatgggcagtttggttcattttcttgctcgcctctagcatttcactttttagataagtagagctttcaaagtataaaggcatcccaggtacttggccaattttatagccaaaggtggttgcatcaacatcgaaataggcaacattatccgcgataaccaaatcaccaatcgctaaacctgcaccgattcccccagcagtgcccgtattaatcaccatattaactttatactgctgaattaagacagacgttgtgatggatgccaagactttcccaattcctgattgaacaacgattacttcgtgatttcccagacttcctgaaatgaataacgcacctgattgctcccaagataatggatgctctagactttcacgtaatgcctttacttctggttccattgcaccgataataccgattttcataatcattcccctatttcttactaataattttttatcttctattaaacaaaaaatactaacaacatgactacgatcagaagcaataatactataattatcgctttatttagaaagctgctgcgctctttttgctttactcgctcactgcttctagatttagtgacgggcttattctttttcaattctttccgataaacattgctaatttctttttctctcttttcataggcgcgttcagcagctctacgttgctcttctgccaagcgctcctgttcctcttttcgcttccttatttcgctgcgcgtcaccaagggtgattggctcatgcgtaatcttcctttctaaatttcattagttcccaataattgacagcaaaaattgttttagcgtcacagattaatccgtcttgaatcgcctgcttcgcttcctccattgttaattcatagagttctagaacctcatcgtcatcttgtggtcgtggattttcgactttaaccagattggtcgcggcgtaaatatataatttctcatttgaaaatccaggtgataaatacatttcgtttatgtacgttaaattttcagtatggtaacccgtttcttcttctaattctctcatggctgttctttctggatactgcccttcaccgggatcaatttttccagcaggaatctccaataccactttttctaacggttttcgaaattgtttgaccataatgattttattttccttagtaatagggatgatccctacaccaccgtgatgaaaaaccaattcacgttttgctgttccgcccattggcaaggcaacatcatctaaataaacttcaataatctttcccttaaacaattctttacgttctatcgtcttctcttcaaaatctttatattctaacattgcgacacctttcctccaagtagcttcaatccaacggttctgccttattgtatcacagaaaattcttatgttttttctaaatcttaaaaatccatctttagtccgatactatttctatagaaattcatgctatgatgagcgtgtaaagaaatcaagtaatttgaataaataatgtgaagggttattactagactaggaggattattatgcgaaggaaaatattcccgatcatcatcgcagcaatcggtattctctccttttttgaaggagacttcggcgactatattgtctttttaatgctggccgttggtttttggttgatctatcgagggattaaagggcgaaaggtccaaccacaaaaagaggaattaccatttctgaccaaagaaaaagaagcttattataaaaaaatggatatgagtgaacgtgaaatcgaattgttccgcgaaacaatgaatctttctaaacaacaagttttacgtttacagcaaaatattcaaaagaatgccaagcttaaagccattgacttgcgccacgaaaccttgaaggcggcgaaagcattgtttaaggaattggtaaaagatccaaagcgtttgccggaggctagtcagtttctttatacacacttgccaaacatcgtggatttaaccgacaattatgtcgaaattaatggacacgaggttaagtcaaaagaagtttatggtaaactagaagaaagcgcacagatcattgatcaaatggctgatttaatcgtgaaggattatcaacaattcgttgccgaagatttagaggacatggatgttgaaatatcaatcgccaaaaaaaatctcgaccaagattctgatctgaccacaaaattaaaaacaaagaatagctaaagagaaaagcttcatgaattcgcttagtctttgatcaataaagctagttcatcaagctaaacatcaacaaaaaaatctagcttaagctagatttttttcgaacaggaggacacacaatggaaccggaaaataacccagagaccaaatcggtcgacagcactttagacgatctacttagcaacccttttggcactgatgctttaacccccgttcaacaacaagaaatctctcatttgcagtcacaagaacaagctgaccgcttagtggataaattacctgaagaacgacaagcgcaggctcgggaacttgcaaaaaaaatcgacgtaaatgattcacaagccgtgattagttatggctcaactgctcaaactaaattgagtgaattctcgcaatcaatgctcaacaccgtttcttcacaagatatcggcccaatcggtgattcattgaatcaattaatgtatcgcttaaacgaggctaatcctgatgaactacgtgtcggcgaaggaaatatttttcaaaaaatgtttggtaaagtaaaacaatcgatttatgagatcacaacgaaatatcaaaaaatcggtgcacagatcgataaaatcgcaacaaaattgaatgtagaaaaagatggtttgttaagagacaaccaaatgcttgaaactctctacaataaaaataaagattactttgatgctttaaatatctatattgccgcagctgaattgaaaattgaagaaatgaagcttacaacaatacctgccgcaacagaaaaagcgcaagcttctggtgatcaaatggacgttcaagtggtgaacgattatacgcaatttttagatcgtttagataaacgaacgcacgatttaaaacttgcccgtcaaatcacgattcaacaagccccacaaatccgcttgatccaaaataccaatcaagccttggctgaaaaaattcaagcttcaatcaatacggcgattccattatggaaaaaccaagtagccatcgctttaacgctattacgtcaaaaagatgctgctacagcacaacgtcaagtttcagaaacaaccaatgatctgttgaagaaaaattctgagatgttgaaaatttcaaccatcgagaccgccaaagaaaatgaacgtggtatcgtcgatttagagacgttgcaacaaacacaaaacgacctggtggaaacactggaggaaaccttgcgtatccaaaaagaaggtcgcgaacgccgacaagcagctgagatcgagattggtcatatggaaagcaacctaaaacaaaaattaatggagttaaactccggacaatagaaaagcatgatcggatacttcatacgaagtatccgatttttattcgttttaatagaaaaagcttgccaacaatattatggcaagctttaataaaatgttgtattaagatttcatatagcctaacaagacgcccccgacgataatcagcagacagccgataataacgtagtacatttcctttttggttttacgttcccctaataggaaaatacctccgagagtcgaaatgataatccccatttgtgacaatgaaaacccaatagctagaccaatattttgaacagtcaacagcatacaaatatttccaattccccacaagagacctgaagccatattgcgccatacatagcgatcaaccttgattttacgaaaagcaaaaaagctagcaccaattagcatgccgacactctgcggtagaataatcgctaacggatcaagtcctgcccaagtaataatgatcgtgtagaccccataaccaagggttgaaaagatcaatgcacgaaaacctttgccgaagtttagcatgctgtcgtctgactgcacaccgctttcgtcatcctttcgagccgttaaataggcacccaggacaagtaatgccaacgcaataaagcctaaaacaaaatccttcgtcttcgtccattcatgaaaaaatacggcaccggccaaagtattcaaaatcaactgaaatccagttgaaatcggtaatccaaccgaaacgcccatgaacttcattccatgaaactgaccattctgaccaattgaccaaaaaagacctgacaagaatccaattaacattatccaactattcattgtcggttgaacgatgaaaaaagtcactaatgcaaaaacaaaagcacccatcgtcattcctaaggtttgctgattggcatccccgcctagttttccgctcaccaaagcaatgcttccccatgctaccattggtattagggcaattaaaatactcataaacttactcccttcaattcacaactgaaacagtttagcgaaaaaaaggaaatttggcaattaaaaactaaaaaatttaacgttcttcatgataataatctaatcgtgggaaaaacaaagtcatagtagttcccttattaactgtggattctgcactcagctcgactcccagcttgcccgccaaggttttggctagatacaatccaagtcctgtagaatgctgctgtgcttttcgcccattttcacctgtaaatcccttatcaaagattcttcctaaatcctctgaggggatcccaatcccgctgtcttgcagtatcaaggcgataccgccatttctggcctcaatctcaatatttatttgaccatgatcaggcgtatatttgatggcattgcttaaaagctgtcggaaaataaactcgatccatttagcatctgtcaatacttttgcgtcctgctccgccaatgttaactgcagatttttttggataaagtaattggcttgactgcgtataatcggttgaataatctttttcaatgaatattcttgaattaaataatcattcacaaattcatctgaacgagaataatatagaatttgttcgacatattcatcaatctgctgaatctcattttgtaataagataaacttatcatcgggaatatcaaattcaatcgaatttaagatcagatccaccgctgctaacggaaccttaatttcatgaatccaagaatccatataatccttctgatctttttgactggctaataactgctccagcatcaggtggtgctcccgcacttgctgatttacgtattcctgaatcagctgctcttcattactggaggccgattctacaaaatgctgaagatgtgcattttcttccttgacaaatgtcttataccatttttttctccgataaaaatcaagtgtgaagaagaggaatactaaaaataattgtaaggtcaataagtaaccaagattgtcccaaaaaccatgcaagtctggtgttaaccaaaccataaaaaccagcaataaacttaatactccccatcccgccaaaaccaataagcgatcttttaaatactttgtaaatgtcatagctgatcctcatttacgggacgatgtacccttgcccgactttcgtttgaatataatcgtcaatgcctgcttgttcaattttgcgacgtaaacgattaatattaactgttaatgtattatcatcaacaaaccgttcgtcatcccagagtgcacgcagtaatttatctcggctcagaatttttccgtgttgtttcattaaaataaatagcagacggtattcatttttactaagatcaacaacctcatcattgattgtcatgctgctattatcaatgttcagtgtaatcccattgtgctccagctcttcgccgctttctgcgtaattataggagcgacgcagcagagcattgatttttgccactaaaatatccacttggaaaggtttcgtaatataatcatccgcacccatattcatcgccatgatttgatccatgttcgtgttgcgggaagagataaaaatgattggaaccttggagacttcacgtattttttgacaccaataatagccgtcataaacgggcaaattaatatctaataaaacaagctgtggtgcgatctgctcaaattcatcaaagacttgattaaaatctgttgtctggtaaacatcaaatctccattttgttaattcctcaccaatcaattgacgaatcactgcttcgtcttctacgatcatgatttttgccattttgttccctcatttctcgaacttatctgatttcctgaacgcttttttatcatcatatcaaagaaccccaaaaaaatgaaaggcgatccttttaagattaatttttggtaaaatccttaaagcctaaattgtcatcaatcatgccgccttcgccagacaagctaaatgcgctgagtcgtggattaaatttgattcgcatttcttcctgcaaatcttcccttgaataccctttgatccaaaaatctccgatattagaaggaattttttcgtcataatccgccttctccatctcaggagaaataatattgatcgaaaactgtgtttgcatgtggatcatcgcatgctgagaataaggacctacaccatcctcgaaggttaacagcaattgtttgtttgagtctaaatatgctgaaagtttttcttttgccgcttcatcaagtgtgattttcataatatcaccttccatcatttttttgactatcaaataaagcccctttatctgattcttatcatcagacgaaggggcacattttgcaaggattcttacttatttaattcttgatcaagtttcattaaattaatttgcggatcttgtgccaagatttctcggaaaattggcaattgtttttgaatccgatccgcttgatcattttctacctgcatgactagcagaggctcatgtaagcttaatcgtaacagcatccagccctttccatgaggctcattcactgaaaaacgcacaccctcctgattctctgggtttacagaaaagccagcttgttttggtagttcagtccggaaggtgtcgatcattttctgaccacactctttataattctctccgccaattgcatagcgaatctcaagggtttctataggctgctctaactccgccatcaaatcggtcaactcacgattttctttttgtagtttcggcaacagcatcaatacttttgcaatcacgtaggcgccatcatctaagaagtaattctctttgaacgctgcgtgggagctagtctcgatcgctaattgacaatcgataccttcctcattcagttcgattgccttgttgatgacgttgcgatagccagaaatatagcgatattgcttgccgcctttttcctcgataaagttttttaaatgatccgaggttggagagtttgtcacaatcgtactgccgggatgctcttgcaaaacaatcgcagataaaaccgcgatcaaattatttcgattaatcatctgcccgtcctttgaaacaatcgccgaacgatccacatctgtatcaaaaatcacgcctaaatccgcttgattgtctaatacagcctttttgatacttgccattgcttctttattgtcaggattcggaatatgatttggaaaatgaccatcaggttctaaaaattgtgagccgctagtatcagcacccagaaccgctaaaactttgtccgcaaagtaaccaccggcaccgtttccggcatcaacaacaatttttaatccttttaatggctgttcattcccgctgcctcgttggattttttcaactaaatcagctgcataacgtgacaacaaatccgcttgcttcacacttccgtctgctgcttcacttgcttcagtgtgcgtcaaaatataagcgatatcacttttctcagcaccgccagtttgactgaaaatcttgattccattgaagtaaaaaggcaagtgactcgctgtcagcatgatccccgcatcacaggcaaattcttcaaactgcgtcgccataaacaaggccggagtcgtagccaacccaaaatccaacacttcgcaacctgccgcctcaaaaacggcgatcatggcattctttaactctggtccagttaagcgactgtcatgtccgatcccaattttaaagggacgcgggacccctttattagacaaccaattaagaatgccatttgcaatcaaacgggtttcttcaatacctaagtttttgactttatcctctgccgtgatagcgattccacgaatgtctgagccattttgcaattttgttaactccattgataaattcctccttcttactcctattattttttatgcggacttaccctcccactgcgtaattccagctttttaattgctttcaatactaattcaatcttactgactaaacaacttataaaaaattaaacggacgttcttcatccatacttttagttcattataccaaaaatcccgaaaaagaaagccttttccgggaaattttattaatttaagtattttctactcttctaaattaaataactcgtgatttcggattcttttttgcttgccgcttctcctgccagcgaatgcgccatccgactaagacatccattacaaaggtcaatcctttgaacaaccaataaataccaaaggttaaaggaaggacgaagaacaaattgcgattccaaagcttgtcgaaatcaaaaaattctctgaaaaataggtagctgcttagataagccaagctcaaaacagtgattaaagcgatttttttcttatccaacgggaaggaaactttatatagcaccagcaaccctacacaccccgtcaaaaaaaccgacattgtggaggttgcctgatagtctaactcaaatagtacgttagctaattggataatcatgaccgcactaacaacagtcaatgctccaggtaaagacacgcgtaaaatattatttaagaaatctcccttgatgcgttcatagcttggcttcaatgccaagaagaaggaagggattcctacagttaacgcgttaattggtgttaattgcaccggctcaaaaggataagggtttgttagaatcatgaaaatcactgccaaaattaacgaatagattgtcttcaccaaatacatcgaagctacccgttcaatattattgatgacgcgacgtccttcattcaacacattttgcattcttgaaaaatcagagtctaacaaaatgacatcggaagcggcccgagctgcgctgcttccatttgccatcgctactccaatatctgcttcacgtaaagccaatacatcattgacgccatctcctgtcatacagaccgtatgatttccctttaaagcttggatcaaggattgtttttgtttcggtgtcactcgtccaaaaaccgtcgttgtgtcaactaaagccttgtaatcaatcggtccatctaagctcgacatatcaacaaaagtttccgcattttttattcctgctttttgggcaatttttgaaaccgttagtggatggtcgcctgagatcaccttcagctggacatcctgtttttcaaaataaccaaatgtttcccgtgcattttcccttaaattatcagagatgatcagcgttgccaacagacgcggttcatataccatctcttcttctaatattccaggatattccaccaataccagcacacgttgaccttcttctaaataaggctgaagcttattctgcatgtcagcagacatattgttgaaaatgaactctggagcgccaaaagcaaagctgccttgttccttaaacgttaccccactccactttcttgctgaagaaaacggcacaattttttccgcttgccaatcagcaacagctgggaaagcctctcgtaacgctttggcagtagcattttgatcctttaattgattcattaaggcacccataattgtgttcaagcgattatcagaaatttcttctaataacgcttcttcgaatttcaatgttccatcggtaatcgtgcctgtcttgtctaaacaaatgacatccacgcgtgctaacgtttcgatagaaggcaaggcctgtactaatacctttttccgtgccagatttgctgcacctacagcaaatgccacactcgtcagcagcatcaatccttcaggaatcatgcttaccaatgccgcgaccgttcctaatacagcctgtttgattgaatcagatgcctgatactgactataaaatagtcctaaacctactggaataattacaatcgtcaaaactgcgatcatgcgactcaatactttggtcaattcggaactgcctgtttttttcgttttcgcttcactagtcaactgttcagcgaaattatcttttcccacagctgtactttgataaaaacattcgccagcagtcacaaaacttccgctaaatagtttatctcgcagcgatttctgtacacgatccgcttcaccagtcaataaggactcatcaacctcaacaccagcaccaaccaataaattcccatctactggtacttgatcaccattgcgtaaataaagaacatctcccaaaacaattgattcctgatcaatctgttttaatttcccttctcttaaaacaaccgctttggtcttcgctaaaaccgataatttatcgatcgtatgttttgcacgtaattcttgtacgatcccaatcaacgtattaatgacaaccacgccaaaaaacaacgtatttttaggtgaacctactaatagcaccaacaatgccaaaacgaaattaagaatattgaaaatattgattgtattttctttgataatctccttatccgatttcaataaattctcttccacttgattcgtctgaccttgttctattttttcctgaacttcagaagctgttaagccttttaaatctgctggaatctctacattatcaaaagtttcttccaccgtttgaactatttcctttttcttcatccggtttcacctcatctcatttgcaaccacgcagtctttagtcacaaaaattatttctctatatttatcttaccactactttcattttaattcgggattgagcattgcacttaagtaagtcataaattatcgttaaacaaataaaaagccgcaataatctgcgacttactttctgactctatacaaataatgtggcatgtcgactccgcgataatgcttgataaattctccacaacgaaccatcccgtttcgttcagcaaccttttgcgaagctgcatttgtatcgcgaatgatggagtaaacttcttgtgcgtttagctgttcaaaggcgtattgcttgcaagcttttgccgcttcagtggcaaaaccattgtgccagaattctcgttgaaataaatacccaatctctaacactgtttggtcagaaaaatcttgccacgtcaatccgcattgtccaatcatttcattcctttgttttaaaatgactgcccacaatccgaacccgtcacgttgataattatctatttgcttcgtcagccagttttgtacctcgccgtcatcgaaggccccttcgtacgcatacattgtttgttcatcttgtaagattttacttaacgactcaatatctgtttgctctaactcacgcaaatacaatctttcggtttcaataatcacctttgctcacctcacagctcatttaatttgcagttttttacgtagttcatcagactaaaactatgcaatccattttaaatttaattcacctagaaagactataaaaagccgcgaactgccgcggcttttctctaaatatctttcggtacataaaagctgcgattatccattccgaaaagccgttccgtatatgttcctggctcagcatttttcacagcgctggacatcatctgcatcgatgcatcgatattatcgatttgatgcaaaatttcagcttccatgattcttggacggactggtgaaccgtactccaacaaaccatgatgagacaacaccatatggcgtaaaacaacgatgtcctcatctgcatcattaattttcaattccgtgcaggctttggtgatttcttcatctactagaaccaaatgtcctactaaattacctactactgtatattcagttgacgaaggtcccgtcagctcgatcacctttcctagatcatgaataatgattcccgcataaagcaaagaagcatttaattgcggatattctttaacgatcgccttaccaagacgcagcatcgtcaacgtatgaaaagccaacccaccagcaaaagcatgatgatttcgtttggctgctggaaactcaaaaaattccttctgatatttatttagtaaaaagcgaacgattcgattccaatgagcgtttgtgatctcgaacaacgttttattgatctcttcttccatttcttcacgcttgattggcgcacgctccatatataacgcaggatcattaggctcttccggttttgttgtgcgcaggtgcatgattttgacctgcggattgccttgatacatttctcgcttgccgtttagaaaaacaacttggccggctctataacgtttaatctcttcttcagatgcatcccaaaatttaccatcaactgtcccagaagtatcttggaaagtaaaagcgataaattttttcccgtttttcgctaaacgaacatccgcatttttgatcaatacatacatctcaaactgctcatcgaccgttaattctttgatttttttcatcgttggactcccttcaattcccagactggctggtgaagctcttggtaatagcttaccatttcttggtcagatgacaaacaaatgacttgatatttttcactaaattgtcgtaataacttggcaaattgatattttcgtcgatgatcataatgcaaccagccgtcatcaatgattactggacacagcggatgcttttgctgcaaggttagatacgcaaaacgaaaggccatcatgacctgatctttggttccagtcgatagattatataggctcaattgatcgacggttactaatccctccgaaaaatccaaacgactatgggcattgtttgtcagctcttgaaaataactggttgcttgctttaatagctcaggtaattgctgctccgataattctgtcgcaatatcctgtaataattgattttctaatttcgctactgcataatcagccgttaacttttctattaccgctcgttgctggctcgcttgctgataaagactatccaatgtgccatcagcttgcatctgttgaatctgcagtcgtgatcgctgctcctgctcctgcaattgatggagctgctgttccccgatttgtatctcttgttgtaaggtacgcaaagattcgttaatttctgcaagtgacgtttcctgttcaaataatgacaagacactttctgttaattcttttaaacgcgtttgtttgtgacgcaattctgtctcacgttgtaaaaacgctggaatctcagaaggatacgtcaaatgaaacttatccaacactgactgctcttgcgttaaaagctgttgctgctgcttttgagtttcgtgaatgcgctgctgtaagagagtattttcttgataggtttgagcaaaacgaatctgctccatttccttcgcaaattgctccagcactaaaagcttttccgacaaattcttttgatttaacggcagccattcagctaaaaattcaaaacgctgttcctgttgcatcaaattttgtcgtaggcttgattgacgttgctgtagttctttacttgtttgaagctgtgccaggtagttttgcgctcgttgattttcctgcacgactgcaaactcattttcagcattagacatatttctatgacgcaattccgtctgaatctgatcagataagtgttgcactttttgctgactccttgtaactttttcagtcatctcgacaacttgaccttcatagacatctaattggcctaatttttcctgccaggtatctttatttactggtttattttgcttcaatgtaccgcctacaccacaaataattgccgctgctattaaaatatagcgtaacggtattggcaagaaaaaggccaaaataaaactcacgcctgcagcaataaacagccacggtggatttttcttcttatcaaacagttctggatgcttttgttcataatcatttaaactagcctctgcttgattccgttgttctttaactaaacctaaccgaattttttgctcttccaactctttctgttggttttgcaaaggaacaaacagttgttgaattgctgcttcatttgcgaacggtcgtggcggatgctctcgccaatttgttggaatcgcagttgcttgcgctaatttgacggcaatccgctgctcttcatccaacattcgagtaattgtcactttttcgtctagtagctgttgaatgcgtgtctcattttctaaatagaagtagtagcgagccgattcttgattgccactatgctgctgcaaagccgcatgcagtttttcctgttcctttattaattgctgatactcttggtaaaagttctgcaactctgtttgttctatgtcagttgctgctgaacgcaaatctagcttttgcaattctaaaaattcagcatagcctgaccaattcaagcgttgttgttctaaaattaactgctgctcctgtaatttacgattcttcgttgcctgttgggtgacgtatcgcttctcatcatcagcttgccttacaagttgctgaaaacccgattcctgagcttctttttctttgatcttttgctgcagcttttgatacgctactagcgcttgattcaagggttgcttacgcccacgtggtcgatagataccttcgtaatgatttttcaactggattctctggtcaaataattcattgctaccggacaaacctaaagaaatcaatgcctcgtgcaagttttcttcgcttagtgcatccaactggtgcagctgttcctgctgaaaagtaaaaacctgacgaaataattgttgattcaagggataaagaagcttttccagtaattcttctcccccttgctgtccgtcctctaataaaacgttcgccttccctttattctttgccttatagcgctcaattgtcactgctccataggttggatgaagaatcaacaaacgtccgccaaatccgctgccgtcattgggtgtatagtcctgtcctttttttcgttttgttggaaaaccaaataaaaccgcctgaataaactgatacaaggttgattttccggcttcattcaagccataaactagttgatttttcgcttcaaataaaaatgtttgctgacgccatttgccgaagctggtgatctctgcttttttaatccacatcagcgttccccctaaaacgatagctctccatcattttctcttttaatctggcgatcgtatccatcctgaactcttgattcatcaaagtgtggagttgaggattttgctccagctcgcttaacaattctgtatagatttccggtgtttgataggtcatgattagctgatcaaccagtttttcatcaaccgcaagatacggtcgctctattggtgaatctgctatagtcaattgccacagacagatatcctgagacacctctgactgtaaagcctctagcaattccccagaagcaacttgatacgccagttcctcccctaatttttcagtctcactaaattctaaatgcagcaaagttggtgctgttacagtgagtttccgaaccagcggaaatagttctttcggctgtcttacatttgctaaagaaagtgtctgtcttctccagcgaacagcttcaacagaaacagtcgttggaattaattgatttccttggctttctactaaggtcacacctgttagattcatttccttttgagtgtgtccctgcggtgttcctggataaatcacataaggcttctcagataaaatttgcggcacatgaatatgccctaaagcccagtaatcatatccttttgctactagctcagataattgaaatggcgcgtaaggcatttgaccgccatgatacattcctatatgaaaatcgacatcttctttacgtggaaattgttcaatcatcaatgcttcaattgtaggatgcagataactaaaactcgtaatggcaatcttctcaccgctatttgtcactaatttttttgtctcaactcgttcttcgtcaaataactgaatattctctggaaaagcaaaccaataacggtcggcttgataaaaatcgtgattgccgaaattcataaaaactggaatagctgcctcagctaaacgatccatctcctggaagaagtaacgctgagtttttaatgttggacgattttggtggaaggtatcaccaacgagtaaaacaaaatctactgcttgtgtgatcgctgtatccacgatattttttagcattttttgatttgctgtaattaaccgctcttggaaatgctctggcacacttgttaagccctcaaaagaacgatccagatgtagatcggcagcatgcaaaaatttcatttgctctcctcctagtcagtctcttagaaataatttccagtcaaatcctgccttctaaaaacttaattaaagaagacaatactgacttttaatcttatttattttaccataaaaaaacgaaaacttgttcgcatttcgttaaagctactcaacatacgcaaaaaagaactatatcgctatgccggactttaagataaggattaagaattatttaattgaaatcattcatagcacattggataatttagagcttttagcgttcctctccttcaagtagcttttctcgtcaaaacagcttcaatcgtttacactatagctgtaaaaaggaggctacatacaaatgaataaggatgagctaataaaaaaagcgaaagagcttttaaatgaaggaaatatcgaaaaggcgaaagtatttatcgaagagcacaaagttgaactgggcgattactatgacaaagccaaggttttattgaaatctgaaaaaatcgatggtttaatagatcgcttcaaaaaattcttttaacaaaaaaagctgcgacgtaaacttacgtcgcagctttctatttctgattaaccttcgtataattcacgaattggtgtcatgatgatgcggttcaaatcattgataattacgctgaaagcttgttctttcaccattaattcgttgatcaattcttcttgttgaaccttctcagctaatgcttgtgcttgtgatgcatcttcatcgctgaagtcttcaccgcgcatttgtttttcttgcaagctttgttggaatgcttggaaatccttaaatgctgcatatgcggtttcgtttttcttcaattctgcaaaagctgcttctaaagatttaaattctggtagttcacgaatttcgcgttctagttcgtttgctgaatcataaatatttgccattcgtattccctcattttctataaaagttacttttctattgtaacatgaatggaaacgggttcacaccctaatttcccggttgatactgttgccacaattcttgggccttatccttcaatttattggcaccttctttggctttttcaaagaagttagctgctccttcactggcttttccgccaatatcttttaactcttcccgccatttactcgtatcgccatttgtttcgccttgattaacttgatcagccgcaacgacttgtccgcccgtcgcatatgcatcggcaacttcaaaggaatactgtccagcataaggcaaaattgattcggcttccgccttgaagacttgtcccacctctgagccgcttgttccacttagataatgtgtctcgctgactttttcaaaacctagccaagtagaaatcacgacattcggtgtataacctacgatccattgatcattgactttatttgcgtcaaagttcgtttcagtcgttccagttttcccagcaacagtgaagcctgctggagctgcttgagccgctgttccgttagaaaatgttcctagtaacatactagtcatttcattagcaacttcttttgagatgacttgttcatacttcggtgagctgttatcctcgatcacagcacctgtggagtcgatgatttttgtaatcaaatgaggctcataaactttcccttcatttgcaaacgcgccataagctgcggccatcttcaatggtgaggtgcctttttccagaccgcctaaagccaaaccataatatttatccgacttgctcaatggaatcccgaattcttcggctttattatagcctttacttaatcccatctcatgcaataaccaaaccgccggcagatttaagctctgagccacagcttgatacatcggtacgtcaccttggtaagtgccatcatagtttttcgctttgtaataagattgtggttcatcctttaaaatactgtctggtttatagccagattctaatgctgatgagtagacacttagtggtttcatcgttgaacctggagaacgctgcatttgtgtcgcaaaattgtagctccggaaaatgtgttctccccgtcttcctactaacgcctgaaccccgccagtttttggatctagcgcaacagacgccgactgaggcattgccccatcggcagcatttgctggaaagttcgcgttgttttcatagacagcttccatttgtttttgataatcctgatccaaggaggtgtagattttgtagcctttatttagtaaatccttttcagtcatgccataacgttcaactgcttcatcgattaccgcatcaaagtaagaaggataacgataacctgcatctgccgaagaatacgtatcattcaactgagagcctaaatcagtagctttttcctgagcttcttgttctttagataatttgccgttttctaccatcacagaaaggacggtgtctcgacgatttacggcattttctaagttatcgatcggattgtaaatgcttggtcccttcagcattccgacgatcgttgctgcttcaccgattgttacttgattagcatccacaccaaaatattttctcgccgcatcttgtacgccccatacaccattaccaaagtaggcattgttcaagtacatcgtcaaaatctgatctttgtcatatttcttttcgatctcgatggccataaagatttctttggcttttcgctctagcgtctgatcgagagttaaatacgcatttttggctaactgttgtgttaaggtactacctccaccagtaatgtggccagcagttattcgacccacaaccgcccgggcaatccctttgatatcgaagccgtggtgtttgtaaaaattacgatcctccgttgaaacgaccgcatcttttaagtaaggcgaaatttgatcgctttctacataagtccctttttgtccatagagggaccctgcttgttcatttttctcgtcataaatcactgtcgactgcttcaaactggattgcagcgtctccacattgaccgattttgccaagaaaaatagatagacgctcattactaaaacacctacaagtgttagtaagagcaaaattttattgatatgatattttttccaaatacgtttgcgccagtggtgaaaacgaatcaaatagggtttgatccattgccaaaaggtttttgtaccgctacgaaacttttgccaaaaaacttttgtaccacttttaaatttgcgccaaatttcctgaaaatccattttttgatctccattctatacaaattcagacacagtgtatcacaaatctcctatctaatgcttgggtctttagacggatacacacttgggtgtattctagcatgggatctcaagaaaaagctgttttttttcttaaatatccgttaaaagtgatacaattaagcggataatccctttctaaagttagcatatcgcaaaaaagcgctcgattctgtattttgcgctttattcactgaatgcttgaaattaaatacattgaaataaaaggagcagtaaaatgattttcactatgaccttgcccaatcaaacatctgtaatgacggtcaaagatttattggaacaggagtggctggtaccacgaaaggtccgccattttattcgaacacgaaagggactcttgatcaatggtgaaccctgccattttcaatcgatggtccagcctggagatgttattacacttacaatcgaagcaagcgattatcctgaacgaacgattctacttggtgaccctaaaagaatttcggttcttttcgaagatgagcatttgatcattgtaaataaacctcatggcatgaagactcatccgaatcaaccagaggaacaggatactttgttgaatcatttagctgcctacttggctcctgattatcagcctcatgtcgtgcatcgcttagacaaagaaaccagcggcgcgattttgtttgcaaagaaccccttcgttttgccgattttaggtcgtttattagaacagaagaaaatctatcgccgatatcaagcaatcgtccatggaacgataaaaaaggagctgacaatcaatcaaaaaattgggcgtgatcgacacgatcgtcgcaaacgacgaattgattctaaaggcggaaaatctgcagtaactcatgtgaccgtcgcaaagcagcataagaatcagacagctgttttttgtcaattagatacaggtagaacccatcaaattcgtgtccacttagccagcattggtcatccgctggtgggtgatcctttgtatagtaaacattctagtggccgtttgatgctgcatgcttatgaacttcatttgcttcacccctttaccaatcaagaaatagctgttcaggcattgcctggattatgggagtaaaaatgaaaccagccaaaacagaatatagactgttttgactggttttcttttaagctttgaaaattatttccataaaaaaaagaggaccatcgtttcgatcctctcggttactatctttagttcttagtaccagccgttggcttgccagaatgattgtgcgccttcccatgaaccgtaacgagaagtcacatattgatccgcaacacgctcttggttttctgcagaatagtcaccgtttaaatatgaagctgataattggtaacgtccgatatattgaccgtttgtagctgaatatgaaccgcctgattcacgttgggcaatccattctttcgctgaagaagttgttgctgcaggagctgtttcttgcacaggtgctgcttgttgttgaactggagccgcttcttgtacaggtgctgcctgtgtttgttgtactggagctgcttgtgtttgttgagctgaagcttcagcttgaactggagctgtttcttgtgctttttcagcttttgcttcgccatcaattgttaatttttgacctgcaaaaatcatgtttacgttagaaattttgttcgcttttgcaattgaatccactaaactatcgttaccagcaaacttgtgagaaatttttgataaagtatctcctgattctacagtataggtttctgaagcgtgcgcatctgtagctcccatcgctaaacctgcacctgctgctaatactgtactaaaaagaaacgttttccctattttcattctgtaacttcctccgatttttcttatgtcttttttcttctgtcttcttgactacgagagatactttaccatccttttgtgtttcatgggtaatattaatgtaacagttcattacaataacataaaactatgtaacaaaacgactgtcagtgtgtcattttgaaatatatcacttttattattatgagtaaaaacccttgatacaaggctgtttcgagaaatgtaactgttttattcttgtattacaaaaattatctttagaaacattgacatctttttgtaaagtaatcggaaggaaaaattctattctttttgaattattttgcaaatattttttacagattttgaatttaaaatttaatttataacaaaaaaatacttctgtacttttcaagtacagaagtatttggttctataatattttgtgttggtggaaaatcgaaggcgattttctactaacacttttttcttcgtttcaactcaaaaagagactcacttttggtaaaatttagtcgaccaaaacgtcaccctaccaaaggagtctctcaatggataatcatactagaaaattactcggattaacagataaacatttattttttgatgaagaatggctgattgaaaaagaatataaaggcgttcaagcgcagtttattaaaggaaaattggatgactctccttcctgttgtgaacactgtcgatcggttcgtattatccgcaacggttcctatacgacacgcactcagatgttgaaagtcaaagaaaagttaactattttagaattaaaacgtacccgttttctctgccatgattgtggacggaccttttctgcgaaaacggacttagttgatgaacatcatcaactaacaaaggaactgaagcaggcgattctcatggaactgtacgaaaatcaatcacgtaaactaatcgctaagaagtacttcgtctcggatgggacggtgacacggatcttgcgtgaagcaacgaagcattaccagccacgtatgaacttccttccgacggtgttgtgtatggatgagttcaaatcaatgaagtctgtttctggttccatgagttttatttgtgttgatgggacaaccaatcagctatttacgatccttgaagatcgcagactttacaaactaactcaatacttcctgcgctttcctagaaaggcccgtttaaaggtcaagtacctagtgatggacatgaatgccagctattgtcagttgcttaaaacggtctttccaaatgcggagatcgtaactgaccgctttcatattgtccaacacatcaatcgcagtttcaatcaattacgtgtccagatcatgaatcgttttcgaacctcacactctgaaaatcagaagaagtaccgtcggctcaagcgatattggaaactcttactcaaagattccacgacattggagccactcaaacggcattatcatcgactgtttaaacgaccaattagtcaaacagaaatcgtcgatgaactgttaagctacaacgaagaattgcgaacagcgtatcatttttgtcaattattacgctattatttcgttaaacgagatacggaaggctttcaagaaacccttaaaacaatttcatctacgttacctcagtcgtttaaaaagaaattcacgatcttccatcgctaccaatcgggcatttcaaatgcctttaaagtgtcccactcaaacggtgtcacggaggggctgaataacaagatcaagctgattaaacgaattgcgtttggttatcgcaacttttataactttcgggcacggatctatttacaacaaggtctgatctttgaaaactaaaaaaatatgcggcgcacagaacgcgccgcatatcggactaagttttattcaaatttgtcttcaccaacacgatttgacgaagagccaagtatttttcatttgattctcaatcgtctacgccattttcttgcttggggtcccaccagtttatcgactaagcgaattttcaaactaagatagaaataaaccaatccacctactccagctgttagcaaacagatggctaaagcagataatcgtgacgctggatcaaacacgagataactcatctgccgcacaataacagcgactatcagcatcactaacgttaaaatcaaaatcagaacacaacgacgaaaggccagctgatagttcgcatggacaactctgcgtagtttccagagacataagccacaggttaggcctaaaccgataaacgtagcagcaagaggtccataaacctctaatagttcaatcagcggtacttgaataatcgctttaagtaataagcctgccagccaatatttcaccgcgactcgactatgggaaattccttgcaacgtcgtcgacagcatcataaataatgctgagactagccccgcccaacaggctgcaacaagcacacgactgcctaaaacatcggccgaataaaagaccgtattcaaaggataagccagtaaaatcattccaaaaacagctggcaacatgatgaaagcaaacagctggatattcgtatttactagtttagccagttcaggtcggcgtctttgagtaaaaagttctgtcagcattggcagactagttaatgcaagcgatgttcctaaagcaactacgaccatcgtcaacttatctggattggcactaaataaagcgtatagatccaccaactgatcatgactgtaattcgtattagcattcatcgtgtgaatgaaggtcacctgatcaatcaatttataaaaggtgattccgccaccaagtaaaataaatggaatcgcctgtctaaccgtttcaaacaataattttttcgtatcaatcgttactttgtctagactgcgtcctatctgcaagtcactcttttttcgatccttaaaccaataaaaaagcaagacgccataagagccgatcattccgacagatgcagcgaaggtcgattggatcaccgcatttaaataatcccctttcatgaccttcataataataaagacacttaatagcatatacaaaacacgcagcgcctgttcaaccaattgtgagacggcagaaggacgcatatcctgttgaccttgaaaatagccccgtaagacactcatacagggaaaggcaataacagcgatgctcaatgcttgtattactggaatcaaagcacgacccccacctgacaaaccagccagcaatggtgctgtgaaaaacatcaagccaccaaagaaaattcctaaaattgccgtagcctgcaaggccttgataaataaacgccgactcgttcgatactctcccatcgaattgtacctagcaatctgcttggctatcgcgcctggcaatccggctgtagagatcatcatgaacaatgcataaaacgtataacccatattaaataatccattggccgcacgggcattttcacccatccaggcataccatggaataatgtagatcgctcctaacagccgtgaaaaaatatttcccacagatagccaagctgatccttggatcattttttcctgataagtcagatcactcggtcgtgtctctttcatggtctcctccttcaaaaaatcgctacccttatagtaaagctaaattgcactcctgacaatcactctttactttttctcttattaagctatgctataatagcctagactatatattggaggtctcaacatgctgacacttacccaaattcaacaaatccttgaacaagaaaatcttttaagagagtttattacgcccacacgttggacgctgactgctccttttgacaaaagctttcaaaaaatttcttatgactcacgtgaagtcgatgcggataccctttttttctgtaaaggaaataactttcaacaaagttttttagaacaggctttatcagaagggttaacttgctacatcgccgagcagccctacgaagttcctgcagagctggcaatcattgtaaccgatattcgtaaagcattggccgttttgagtatggccttctatgattacccgcaagaaaaattacatctggtaggaatcaccggaacaaagggtaaaacaaccgtcgcctacttcaccaaaaaaatcctagacattacgacaaataaaaagactgctcttctatctactttaaataccacactagatggtgtaacctttttcaaatcaaaacttacaacacctgaatcgttagatttatatcggatgatggctgaagctgtggccaatggtatgacgcatcttgtcatggaggtatcttcccaagcgtataaagtagcacgtgtttatggtttaacctttgatgtcgggatttttctaaatatttctcccgatcatattggaccgatcgagcatccgacatttgaagattacttctattgtaagcgacaattagttgccaactctcgtcaagtcatcttacagcatgaacttgatcactttgatcttttattggaattggctgaaaaacaaaatatttccgtcataacatacgggaataagcaagcagattatcacgtacaaccatccgaacatccgctgtcctttgaattaacagggcgggaggacacctttggattaaatggtaactactctattttgttagcaggcgattttaataaggaaaatgctgctgcagctctattagccagtgctctcgtcggtgcggatcaagctgcgggacatcaaggattggctgaagcactggttccaggccgcatgaatcttttaataaaaccaaacggtgctcacatttatgtggactacgctcataattatttaagtatgaaatcattgctcgcttttgctaaagaacagcatccagatggtgaactccttgtcattaccggttcaactggaaacaaagcagaatcgcgccgcgaaggcttgggccaagcaattggtgaatatgccgatgtggcgattttgaccagtgacgatcccaactttgaagatcctaaaaagattgcagacgaaatcaaacaaagcattaaaaatgatcatgtacgcgtacaatttgaaagtgatcgtaaaaaagccatcaaagaggcgattcagcaggctgggccaaaggacgccatcattttagcaggaaaagggaccgacaaatatatgacggttaacggcgaagacctgccctatgaaggtgattatcatttagcagaggaatttattaaggactaacggcattgtccgttagtctatttttatgttctgacagatcactgctgcctccgcatatacctcttcaatcaaagctttagctggcttcacttctgaaaacagccccgcaatttgtccagccatcacagcgccgttttctgtatcgccgatatctgtggcgcgtttcaatacttctattgaaaaagcttcatttgttttttccttatcagtcaaattattttttaacccacggatcgctccacccttagttttatgaagcactacggttgccgtatcatctgcttgtagaatcgcttgctgataattttcatgaactggacactccgcaactgtcaaaaaggccgtccccatttggacaccctgtgctcctaatgcaaaggcggctgccattccacgaccatctccgatcccgccagcggcaatcacagggatagctaccgcttgaacgacttgtggaatcaatgccatggaagtcgtttcaccaatatgtccgcctgcctccatcccttctgcgatgataccgtctacacccaactgctccattttttgtgccagtttcactgaggggatcacaggaaacactttgatattggcctgcttcagacgttccaaataaggcttaggtgttcctgctccagtggtcacgatcttaaccccttcttcaatcaacacctcaacttgctctggaatattgtccatctgcaacatcaaatttacggcgaacggtttctttgttcgttcttgagtcctacgaatttgttctcgcaattcttcgctgcttaacccgccagcagcgataatcccaagtcctccagcttctgagaccgcactagctaatgggtagcgagcaatataggccattgctccctgaaaaatcggatactgaatatctaatagtttagcgattgagttcataaatgcacctcattcctttttttcttatcctagcatacttcaagtattcgctcgttattttgtccgcacctaaaaatgctccgcattaacatgcggagcatcaaaattaatttgctacaatattgactaatttgttgggaacgacaatcactttacgaaccgtttttccttcgatgttgcgttggatatgttcatcctccattgccaatttctctagttcatctttcgctaaatcaacagctaccatcactttagaacgaaccttgccgttaacctgtagaatgacttcgatctcattttcaaccaaggcttcttcatcataggttggccaagctacgtgagaaataccgccttcatgtcctaagatcgcccacagctcttcagcaatatgcggtgcaatcggagctagtaattgtacaaagccttcgacatattcatacgttaatgcttttgctttataggcatcatttacgaagaccatcaattgagaaattgcggtgtttaaatgcaagttctccatgtcttctgtcacttttttaacagtttgattgtaaacctttgtcaatgagccatcgttgaaggtggtgatatgatcacgcatcttgccttcttcatccacaatcaaacgccacacgcgatccaagaatttacgtgaaccttcaagaccgttttcactccaaggaatctgagcatccaatggtcccatgaacatttcatacatacgtaatgtatcagcaccatatttatctacgacatcatctggatttacaacgtttttcaatgatttactcattttcgcaggtgcttcttctaactcttcgcctgtttcaatactgaaccattttccatcacgtttttcaaccatgttcgttggtactagagcaccgcggctgtcacggaagctttgacctaagatcatgccttgattgtataatttttggaatggttcattcgttggcacaacgccgatatcgtataagaatttatgccaaaaacgaacatacaataaatgcaatacggcatgctcagcgccaccaatataaagatcaacaggcatccaacgttttagtttgtcatagtctgccaaagcttctttattatgcggatcaataaagcgcaagtaataccaagagcttcctgcccactgtggcatcgtattggtttcacgacggccttttttaccagtgattggatcaacgacattaacccactcttcaatatttgctagtggtgattcgcctgttccacttggtttaatatctgttgttttcggcaattccaacggcaattcgtaatcaggaactaaaccagttgtaccgtcttcccaatggataacaggaataggttcaccccaatagcgttgacgtgagaacaaccagtcacgcaagcggtagctaatttctttttttccacattcatgttcttcaagccaagctagcattttatcgatggcgtcttgtttatttagtccatccaagaattctgaattgatatgcggaccatcgccagtgaaggcttctttatctacatctccgccttcaagtacaggaatgatcggcaaaccaaatgttttcgcaaattcataatctcgttcatcatgagccggaactgccataatcgcacccgttccgtaagaagctaaaacatagtccccaatccagattggcattttttcaccgtttactggattaatagcgtaggcaccagtgaagacgcccgttttttcttttgctaagtctgttcgttttagatctgactttttagaagcttcttcaatataagcatccactgctgttttttgttcagatgtcgtaattttttgcaccaaatctaattctggagccagcactgcataggttgctccaaacaacgtatccggacgcgtagtgaagacagtaaatgtttcctcactattttcaattttaaaacgtacatttgcaccaattgaacgaccgatccagttacgctgcatctctttgatactttctggccaatcaagatcttccaaatcatccagcaagcgatccgcataggcggtgattttcagcatccattgacgcattggtttacggatgacatcatagccgccacgttcacttttcccatcaataacttcttcattggaaataactgtacctaattcaggtacccagttgacaggaacttccgcttcataagccaaacctttttcatacatctgttcaaaaatccattgtgtccatttatagtaatcaggatctgtagtatttaattcccgattccagtcataactgaatcccaatgcattgatttggcgtttaaaggtttcaatatttttcttggtaaattccgcaggatcattaccagtatctaacgcgtattgttcagccggcagaccaaaggcatcccagcccatcggatgcagtacattataaccttgcgcccgtttcatccgtgaaatgacatccgtcgctgtatagccttctgggtgtcctacatgtagtccttgtccagatgggtaaggaaacatatccaacgcgtaaaattttggtttttcaggatcatctgtggtattaaagacattatgctttgcccaatatttttgccattttttttcaatcgctttgtgatcgtaactcatgttgttcctcctaaattgatttcatcatttttaactacaaaaaaatcccatgaaagttctcaaaactctcataggacgttatcaacgtggtaccacctatttttatctgtcaaacgacagacctcaaaagaaataacgggctttaaccggatcattcgatcatgctccaaggtaagttcgaatgtctcgcatacacactctcagcaccgtgcgctctctgaaatgcgttcgtttctactactcctcttccaagcaacaatattcaaagtagtttcatcttagcagattccaaaacaatattcaattgaattccctttaagaaatcgttgaataaattgtcccttagtcaaaacatgatataatacttctgtttagaaaggatgaatcagagaaaacaatgaaaaataaatcaatctatcaattaatcggcagttttaccctgctgttttttgcggcactgtgttacatcgtccgtttttatccagaaacattaaatggttttgatcggagtatcatccatgcggtccatcagctgtatccgcagatgaacggctattttttatgggtgacaaaatttgctaatccaattaccgttgtcatcttaacattggtatttgttggtttattctatttcaataaacaaaagattacggccctttggttagccattactatggcattgattagtggtatcggcaatcatctgctgaaacttttctttcatcgagcgcgcccaacgatcttgccccacatggtgacagagcacagctttagttttcctagtggtcacgcaacagctagtaccttattatatggtacattgatttttgttatggctctattcttcaaagaaaaaacaccacgtttgactgctcagatcgtcgttggtttattgattctaagtattataatcagccgtatctatcttggtgttcattatccaagcgacgtcctcgctggaatgctttttggtagcagttggctactattcacgtatccttattacaaacagaaaaaattaatctatgatctaaaaacgattaggagaaattaaatgacttttcaatatactgacgatccaaccaaacgttaccattcatggaattatgccttgcgccaacaattcggtgggaaaatttttaaggttcccgttgatggtggttttgattgtcccaaccgtgatggtacggttgcccatggcggctgtacattttgcagcgtttctggttctggtgatatgattgttgcaccaagtgatccgctgcctcaacagtttcacaaagaaatcgacatgatgcatcaaaaatggccccatgtcaatcaatacatcgtttactttcaaaattttacaaacacccacgcccctgtagaagtaatccgcgaacgctttgagcaggttgtcaatcttcctggtgtcgttgggttatctgttggtactcgtcccgactgtttgccgccagaagtggtggactatttagctgaattgaatcaacgtttatatctttgggttgaattgggcctgcaaacaacctatgaaagtactagtgataagattaatcgtgctcacgactatccaacttatgtggatgcagtcgcgcgtctacgtaaacataatatcaatgtttgcactcacttaatcaatggtctgccgggtgagtcattagagatgatgcgggaaaatgttcgccgaacgattttagattccgatattcaaggaatcaaactacatcttctgcatttgatgcgtaataccaaaatgctgcgggattatgcagaaggacatttacaactgatgagcaaagacgattatgtttctgtcatttgcgatcaattagagctgattcctcaagaaattattattcatcgcttgaccggtgacgctccgtgggattcattaattggtcccatgtggagtttaaaaaaatgggaagttttaaacgcgattgatcaagaattgattcgtcgtgattcctatcaaggaaaatttgctttgagaggggcatttactcatgctgctaacagctctgcggtatagtcatcaattgctgaaggaaatagtaaacgaaggtgatcacgtcattgacgctacgatgggcaatggcaatgacacgttatttctagcagaactcgtcggtacaaccggtcaagtttacgccttcgatatccaagagcaagcgttacaaaatactcgtgacaaaatttctgactatagcgagcgcacaacgctatatcttgctggacatgaaacgattgaagaaaaaatctcagctgaccaaccaattaaagccgcaatttttaacctcggctacctaccaaaaagcgataaacagatcgtcaccttgcccgaaacgaccaaacaagctatgaccgccatcttaaaacggttaaccattggtggtcgcatgatcatcgtcatttattatggacacgaaggtggagaagctgaaaaaaacgaagtcctgcattattgccgagcattaccgcaggaaaaattcagcgtattaaattatcaatttatcaatcaaaagaataatccaccgattttattgtgcgtagaagctatttcacattgaaactatcatctgctacaacatatatacctaaaaaagagtgactgatcaaaaacgatcagtcactcttttcattcaaccattctagaacacgcttgatccaagtatcccaaaatacccaatcatgtttcccagttccttcttcaaaggttacattgaggttcttttgcttcagtttatgagccatgtattgactagccgggaacaaatcatcttctgttccacaggccaagaaaaagcgtggtgctgtctttccgctatcaaccagttcatccaataatcgcaaaggatcattttttgaccctttgatctgatccaagggtccgaagattccttgccaataagcttcatttcgtaccagcaataaactttctacatcagataaaaccactgcccccgataaagaagccaccgcggcaaaattctctggttttgccaagcctagtttcaatgcaccatagccacccatggataacccagctgcaaaagttttttctcgtttatgagtcaattgtggaaagagctcatggacaatcgttggcaattcctccgaaacaaacgtccaatagttcatatcatacgttgtatcagtgtaaaagccaagatccgtcgagggcatcaccactgccatctgatattcagccacatatcgctcgattgaagtccggcgttcccagacactatgattgccacccatgccgtgtaataaatataagaccggaacatcttcatttacaccaatggtttccgttccaatcttcttatgcgtcgtttgtggcaaaatcacgttcattgctacttccatttgtaaaacattcgagtagacattcacctgtaaaaaagccattcagctagatcccccagttctttattcttcattcagtttaacacttctcgtttgtttgccaaccataaagctaaaaatcaaggcaaaaataatcagcaataacccaacaaaatatatccaatgaaggctggcaaaaagaatattacgtagttccattcgcaagttcgactcaatctgtaaagccgtatgaggattaatcaaacgattcatgatatccagatccgtgatcccagcttttgttagctgctgcacgttcgcaacgttcaaaataattccaaaaagtgaaaccatgactgtttgaccgattgtacgagaaagcgtattgaaagaagttgccaccccgatttcttccttcggtacactggcctgcgcttccaccgttgtcgttgtaacggataatccgtaaccaacacctaagacacccataatgatgaaaaatagccaaaaaggactttgttgcggcaataccactaacgttcctccaccgatcaagataataatcaagccgctaacgataatccattttgcagaatacttacgtaataattgacctgataaaaaggaaccgtacatccatacaatcgacatcggcgctaagaccaaaccaccaattccggctggctttcctaggactccctgcatccacataggaatatacacatccagtcccattaaaaagccgctaattaaagccgcgacaacattcacactagcaaatgtcttgttattgaacagcttcaaatttatcacaggatcttctgctcgtttttctgttcgaataaagagtatcaatgagaaaatactcactgcaaataaagcaataactgataacgaaagaccttcatcacctagcagttgaaaacctaataataagcttaaaagtgtcagcatcaagaacaagcttccgaatatatccatcttttttgcttgatgctcttttttctcttcaataaagaaatattgcagcaaaccgatcaaagccagtccaattggtacattaataaagaaaatccaatgccacccaatcgtatctacgatcaaaccaccagctaaaggaccaaaaacactagcaacgccccaagccgcactcgtcagccccaaaaccttggcccgcttttcaatatcatagagatcggcaataattgtcaaagacacgggcataattgctccagcaccgattccttgaatcccacgagcaataatcaacgtcaacatttcattagacatcccgcataatgccgatcctaaaacaaataataaaataccaacaataaaaattggttttctaccaatcttatctgccaattttccataaatcggtgtaatcatcgcatttgttaataaatagatggaaaatacccagttcataatttcaattccatgtaaactacccacgatcgtcggcatggccgtcgtcacgattgtaccttcaatcgcagacataaatgtcgcgataaatattccagcagtcacaaccttcacatttgtttttctattcattttttcctccaaatctatttttcaatctttagttactttaacatagaagtataacttatttctcataaggcagaacaaaaatgcctaaaaaaagagacagttctatcaatcaatgatcaatagaaaccgcctcgtgaactccataaacattttatgtctgtacgatttattctagattcaaacttttcttcaacgcctcgactttatcgatatgctcccaaggtagatccacgtctgttcgaccaaaatgtccataagcggctgtgtcgctatagattggacgcaacaaatcaagcatttcgataattcctgccggacgcaaatcgaagttttctcggatagcaccaatcaatgcttcttcagtaacctttgctgttccgaaggtattgactgaaatagaaacaggctgtgccacgccaatcgcataggcaagctgcacctctactttttctgctaaaccagcagccacaatatttttcgcaatataacgagccgcataagatgcagaacggtctactttagttgcatctttcccagaaaaagcaccgcctccgtgacgtgaataaccaccataagtatcaacgattattttacgtccagtcaatcccgcatccccttgaggcccaccaatcacaaaacgacctgtgggattaataaaatatttcgttttatcatccaataattcagcagaaatttcatgtttgattactttttccatgacatctttttgaatcgtctcgttatcaacagcatcattgtgttgagtactgataacaactgtatcaacacgcaatggttttccattttcgtcgtattcaacagtcacttgagactttgcatctggaccaaaataagctacctccccagatttgcgcaaatcagctaaacgtttcactaaatgatgactcaatgaaataggcagtggcatcagttcaggtgtctcattcaccgcaaaaccaaacattagtccctgatctccagcaccgatatcatccaatagttcttctttaccacgagtttctaaagcatcatcaacaccttgtgcaatatccggtgattgttcatcgattgccactaaaacagcaacattgtcaccatcaaacccaaatcttgactctgtataaccaatgcgtttaatcgtttcgcgcaccactttttggatatctacatacgccgaagtagagatttctccaaaaactaaaacaagcccagtcgttacagacgtttcacatgcaactctggcttttggatccttttctaaaattgcatccaaaatagcatcactgatttgatcagcaaccttatccggatgtccttctgaaactgattcagatgtaaataaacgacgttcttccattataaatattccccctaatttttattcggttacaaggaatctctgaataattcagagcctatcgggaacttgcaacgtctcgattataacagaaaaatagcctctgtcactaataaaccgtcattaaacctgaaaatttatggaaattcgttttcaaacaaaaaaggttctataatattttgtgttggtgaaaaatcgacttcgattttctaccaacactttttcttcgtttcaactcaaaaagagactcacttttggtaaaatttagtcgaccaaaacatcaccctaccaaaggagtctctcaatggataatcatactagaaaattactcgaattaacagataaacatttatttttttcggactaagttttattcaaatttgtctccaccaacacgatttgacgaagagccacaaaaaaaaagagacgtttaaaacgtctcaaaatgacccgtacgggactcgaacccgtgttaccgccgtgaaagggcggtgtcttaaccgcttgaccaacgggccatatatcaaaaaacggagaaggagggatttgaaccctcgcgccggtttcccgacctacacccttagcaggggcgcctcttcagccacttgagtacttccccaaaaaccaaaaagatttttaatgggcctaaatggactcgaaccatcgacctcacgcttatcaggcgtgcgctctaaccagctgagctataggcccttcttaaaaactaaagcgggtgacgagaatcgaactcgcgacaacagcttggaaggctgtggttttaccactaaactacacccgcaattctgatggcgcgggacagaatcgaactgccgacacatggagcttcaatccattgctctaccaactgagctaccgagccagaagcggtcccgacgggatttgaacccgcgatctcctgcgtgacaggcaggcatgttaacccctacaccacggaaccgtattttttttagtttttaattgcgggagcaggatttgaacctacgaccttcgggttatgagcccgacgagctaccagactgctccatcccgcgataatagtattaaaaggaggataagggattcgaacccttgcacggttttacccgcctgacggttttcaagaccgttcccttcagccggacttgggtaatcctccaaataaaaataatgacccgtacgggactcgaacccgtgttaccgccgtgaaagggcggtgtcttaaccgcttgaccaacgggccataaattttaatgggcctaaatggactcgaaccatcgacctcacgcttatcaggcgtgcgctctaaccagctgagctataggcccttcttaaaaactaaagcgggtgacgagaatcgaactcgcgacaacagcttggaaggctgtggttttaccactaaactacacccgcatggcggtcccgacgggatttgaacccgcgatctcctgcgtgacaggcaggcatgttaacccctacaccacggaaccgtatttttttagtttttaattgcgggagcaggatttgaacctacgaccttcgggttatgagcccgacgagctaccagactgctccatcccgcgataatagtattaaaaggaggataagggattcgaacccttgcacggttttacccgcctgacggttttcaagaccgttcccttcagccggacttgggtaatcctccataaaagagtcactatggaccttgtaggactcgaacctacgaccggacggttatgagccgtctgctctaaccaactgagctaaaggtcctggctcgaataaaatcgcggcggaggggatcgaacccccgacctcccgggtatgaaccggacgctctagccagctgagctacaccgcgttattaataaaaaatggagcctagcgggatcgaaccgctgacctcctgcgtgcaaagcaggcgctctcccagctgagctaaggccccaaaattttatttctatcgggaagacaggattcgaacctgcgaccccttggtcccaaaccaagtgctctaccaagctgagctacttcccgaaatgcacccgagaggactcgaacctctaaccccttgattcgtagtcaagtactctatccaattgagctacgggtgcgttatttagttaatgccgaggaccggaatcgaaccggtacggtgatcactcaccgcaggattttaagtcctgtgcgtctgccagttccgccaccccggcgttcttccctggtcttcaggaaagcggaaaacggggttcgaacccgcgacccccaccttggcaaggtggtgctctaccactgagctatttccgcgtgatgccggctaaaggacttgaaccctcgaccctctgattacaaatcagatgctctaccaactgagctaagccggcaactacaaaaaaataaaatgcgggtgaagggacttgaacccccacgccgtaaggcgctagatcctaaatctagtgcgtctgccaattccgccacacccgcatatacttatgagccgtactgggctcgaaccagtgaccctctgattaaaagtcagatgctctaccaactgagctaacggctcaaatggaggttaacgggatcgaaccgctgaccctctgcttgtaaggcagatgctctcccagctgagctaaacctccatgagttcgcgtggcgacgtcctaatctcacaaggggcaacccctcactacaatcggcgctaagaagcttaacttctgtgttcgacatgggaacaggtgtatccttctcgctatcgccaccacactagtatttaattgagtaaacgtcgttcactcaaaactggatcagaaacattctaacaaccgtgaatcaatttttggttaagtcctcgatcgattagtatcagtccgctccgtacatcactgcacttccactcctgacctatctacctgatcttctctcagggatcttactttcttaaagaaatgggaaatctcatcttgaggtgggcttcacacttagatgctttcagcgtttatcccttccctacatagctacccagcgatgcctctggcgagacaactggtacaccagcggtaagtccatcccggtcctctcgtactaaggacagatcctctcaaatttccaacgcccgcgacggatagggaccgaactgtctcacgacgttctgaacccagctcgcgtgccgctttaatgggcgaacagcccaacccttgggaccgactacagccccaggatgcgacgagccgacatcgaggtgccaaacctccccgtcgatgtggactcttgggggagataagcctgttatccccagggtagcttttatccgttgagcgatggcccttccatgcggaaccaccggatcactaagcccgactttcgtccctgctcgacttgtaggtctcgcagtcaagctcccttgtgcctttacactctgcgaatgatttccaaccattctgagggaacctttgggcgcctccgttactctttaggaggcgaccgccccagtcaaactgcccatctgacactgtctcccaccacgattagtggtgcgggttagagtggtcataacacaagggtagtatcccaccagcgcctctgtcgaaactagcgtcccgacttctacggctcctacctatcctgtacatgtggtacaaacactcaatatcaaactgcagtaaagctccatggggtctttccgtcctgtcgcgggtaacctgcatcttcacaggtactaaaatttcaccgagtctctcgttgagacagtgcccaaatcgttacgcctttcgtgcgggtcggaacttacccgacaaggaatttcgctaccttaggaccgttatagttacggccgccgtttactggggcttcaattcgtaccttcgcttacgctaagcactcctcttaaccttccagcaccgggcaggcgtcagcccctatacgtcatctttcgattttgcagagacctgtgtttttgataaacagtcgcttgggcctattcactgcggctgatcgttagatcagcaccccttctcccgaagttacggggtcattttgccgagttccttaacgagagttctctcgctcaccttaggattctctcctcgactacctgtgtcggtttgcggtacgggccattgttttctcactagaagcttttctcggcagtgtgacatcaggaacttcggtactattatttccctccccatcacaacttgtccttagagatgtaagcatttgactcacatcaagactcattgcttggacagacatttccaatcgtctgattccttagcctcctgcgtccctccattgctcaaacaaaaacaacgggtacaggaatatcaacctgttatccatcgcctacgcctttcggcctcggcttaggtcccgactaaccctgggcggacgagccttccccaggaaaccttagtcattcggtggacaggattctcacctgtctttcgctactcataccggcattctcacttctaagcgctccagcagtcctcacgatctaccttcaacgcccttagaacgctctcctaccaacacaccattggtgtgttccacagcttcggtaaactatttagccccggtacattttcggcgcagggtcactcgactagtgagctattacgcactctttaaatggtggctgcttctaagccaacatcctagttgtctgtgcaaccccacatccttttccacttaatagttatttggggaccttagctggtggtctgggctgtttccctttcgactatggatcttatcactcacagtctgactcccagagatgaatggatggcattcggagtttatctgaattcggtaacccgagatgggcccctagtccaaacagtgctctacctccatcattcttactctgaggctagccctaaagctatttcggagagaaccagctatctccaagttcgtttggaatttctccgctacccacacctcatccccgcacttttcaacgtacgtgggttcggtcctccagtgcgttttaccgcaccttcaacctggacatgggtagatcacatggtttcgggtctacgaccacttactcattcgccctattcagactcgctttcgctgcggctccgtcttttcaacttaacctcgcaagtaatcgtaactcgccggttcattctacaaaaggcacgctatcacccattaacgggctctaacttgttgtaggcacacggtttcaggatctatttcactccccttccggggtgcttttcacctttccctcacggtactggttcactatcggtcactagggagtatttagccttgggagatggtcctcccggattccgacggaattcctcgtgttccgccgtactcaggatcctcctaggtgccagtcaaattttgtctacggggcttttaccctttctagcagacctttccaggtccttcgactatctcactggactaccatatcggagtcctacaaccccaagaggcaagcctcttggtttgggcttttcccgtttcgctcgccgctactcagggaatcgatttttctttctcttcctgcaggtacttagatgtttcagttctctgcgtctacctctaatcagctatgtattcactgaaaagtaacatcctataaaagatgctgggtttccccattcggaaatctccggatcaaagcttacttacagctccccgaagcatatcggtgttagtcccgtccttcatcggctcctagtgccaaggcatccaccgtgcgcccttattcacttaaccttatcttgactttcgtcaagggtcttactaattcccatgagcgatcatgttccttagtaataaataagcaattgaacttattaaaaaactcattcaacgcggtgttctcggtttgtttaaaattgtttctgtatccagttttcaatgaacgatttgagagtagacctctcaaaactgaacgaataaagcattcctgtgtagtttccgtaacgttcatcttcgatgaactatttccttagaaaggaggtgatccagccgcaccttccgatacggctaccttgttacgacttcaccccaatcatctatcccaccttaggcggctggctccaaaaggttacctcaccgacttcgggtgttacaaactctcgtggtgtgacgggcggtgtgtacaaggcccgggaacgtattcaccgcggcgtgctgatccgcgattactagcgattccggcttcatgtaggcgagttgcagcctacaatccgaactgagagaagctttaagagattagcttagcctcgcgacttcgcgactcgttgtacttcccattgtagcacgtgtgtagcccaggtcataaggggcatgatgatttgacgtcatccccaccttcctccggtttgtcaccggcagtctcgctagagtgcccaactaaatgatggcaactaacaataagggttgcgctcgttgcgggacttaacccaacatctcacgacacgagctgacgacaaccatgcaccacctgtcactttgcccccgaaggggaagctctatctctagagtggtcaaaggatgtcaagacctggtaaggttcttcgcgttgcttcgaattaaaccacatgctccaccgcttgtgcgggcccccgtcaattcctttgagtttcaaccttgcggtcgtactccccaggcggagtgcttaatgcgttagctgcagcactgaagggcggaaaccctccaacacttagcactcatcgtttacggcgtggactaccagggtatctaatcctgtttgctccccacgctttcgagcctcagcgtcagttacagaccagagagccgccttcgccactggtgttcctccatatatctacgcatttcaccgctacacatggaattccactctcctcttctgcactcaagtttcccagtttccaatgaccctccccggttgagccgggggctttcacatcagacttaagaaaccgcctgcgctcgctttacgcccaataaatccggacaacgcttgccacctacgtattaccgcggctgctggcacgtagttagccgtggctttctggttagataccgtcaagggatgaacattctactctcatccttgttcttctctaacaacagagttttacgatccgaaaaccttcttcactcacgcggcgttgctcggtcagacttgcgtccattgccgaagattccctactgctgcctcccgtaggagtttgggccgtgtctcagtcccaatgtggccgatcaccctctcaggtcggctatgcatcgttgccttggtgagccgttacctcaccaactagctaatgcaccgcgggtccatccatcagtgacgcaaaagcgcctttcaaaccgaaaccatgcggtttcgattgttatacggtattagcacctgtttccaagtgttatccccttctgatgggcaggttacccacgtgttactcacccgttcgccactccttttctttcggtggagcaagctccggtgaaagaaaaagcgttcgacttgcatgtattaggcacgccgccagcgttcgtcctgagccaggatcaaactctcataaaaagtgtttgaaacagtcttgcgactgttaagctcaattgtattaattgacttgctagcatattgcttgctatgttgtttgcttctatataatagaagcgccctacacatttggtttgttttattcgttcagttttcaaaggtctacattgtttgccgctttgtttcagcaacttttaaatcataacagattgccgttttgatgtcaataacttttttgaagtttttttcgaagaagttgttgccatcgctttatgcgactttgatagaataactgaaagtcagtcatctgtcaataacaattttcaagttttttttgagcggtatacgctcgctttggaacataaaataatataccaacataatcctcttcggtcaatcaaaaatactgatttttttcaactttttttcattcctgaccattgttactcattgctagtgtaaatgttcgcaaataacatgaaaactaattgaaaattcccttttcacaaaaagataggccgcattttagaattgaagagttacatcattttctaataattctttttaagattataaaaagacgctcagcataactgaacgtctttgaaaatttatttttaacgcatagtcgggaacaataaaacatcacgaattgactgaacatctgtcaacaacatgaccagtcgatcaatcccgattcccaacccaccagtaggcggcataccatattctaacgcttctaagaaatcttcatccacaccatgtgcttcatcgtttccttgctcacgttctttctcttgtgattcaaaacgttctcgttgatcaattggatcgtttaattcggtaaaggcgttagcgaactcacgccctactataaatagttcgaaacgatcagtaaaacgtccatcttccgtatttttcttggcaagtggagatacttctactggatgaccataaacaaaagttggttgttgtagtgtttcttcaacaaatgtttcaaaaaactcattgataatatgtccaacttccatattatcattgatttcaacattgtgctcttttgctaatgaacgagcttcttcaactgtcatttcaggccagaaatcgaccccagtttgttctttgatagcatcaaccatatgaatacgtttaaagtcagagcctagatcaatactttgctcatcataagaaagtgttgttgtacccagaacattttttgcaacatcacggataattccttctgttagattcatcacgtctaaataatcatgatacgcagtataaacttccatcatcgtaaattctggattatgggtagtatcaattccttcattacggaagacacggccgatttcatagactttttccattccaccaacaattagacgttttaaatgcaactcaagggcaatacgcaggtataaatccatatctaaagcattgtgatgtgtgataaatggacgagcagtcgctccgccagcttcattatgcaaaactggtgtttctacttcaatataccctaaaccatctagataacgacggatttgactaatgatttgactgcgtttagtgaatcgatcaaagctttcacgattactgatcaaatctaagtaacgttgacgataacgttgttcaacgtttgttaacccatgatatttttctggtaacgggcgcaatgcttttgatagtaaagtaatttctttcgctttgattgatacttctcctgtatcagtcttcatgatttcaccagttacaccaaagaaatcacctaaatcaccctttttaaagatcgcataagactcttccccaacttcgtctttacgaacataaatttgaatttggccttcgcggtcttgcaaatgagcaaatccaactttacctttcccccgtttggtcatcattcgaccagcaacgcttgccgttaattgcttttctaatagctcttctttagtattttcatcgtaagtttcatgcaattcttttgaatttgtcgtgcgttcgaagcgtgcgccaaatgggtcaataccctcttcacgaagattttccattttttcgcggcgaacacgcatctgatcgttcatttctgtcaaatttgtttgttcctcagtcacgaatgttcctcctcagtatgtaattactcttacttataatgccaatgaataggcaaaaaatcaagccgaattcctcattcggcttgaagtttagctaatttttgcttttgtttcagtcttttcgacaagtcgatcaagtaaatcgtagatgacttgtttgtcttctgtttgattaatcgctacttttgttttggcagatcgtgaaattccttttagatagtaactagcatgttggcgaaattcgcgacaagcgattttttcaccttttaaatttatcaatcgttctaaatgaagcttggctgtttcaattttttctcgagcacttggttcggggatcaattctcccgtttctaaataatgctgcgtttgatgaatcatccaggggtttcctaatgcagcacggccaatcatcactgcatcaacaccgacttcctcgatcattcgttttgcatcctctggggtacgaacatcgccatttcccataaaggggattgttaattgatcagcaacttgttttaacacattccaatctgctttgccttcatacatttgaactcgtgttctgccatgcatcgcaagcgctgatgcacccgcactttgagcggccaaggcgttttcaacggcaaaaacatgttgctcatcccaaccaatgcgcattttgactgttacggggatatccacagcggaggaaacagcctctaccatttcatagaccttattaggatccaacaaccatttagctcccgcttctgctttgatgactttattcactggacaccccatattaatatcgatgatatctgcttctgtattctcttggacaaatcgtgcagcctctactagtgtctccttactaccaccgaaaatctgtacacttagtggatgctcaccctcatcaacataaagcatctctaaggtttttttatttctaaaatgaattccttgatcactgatcatttcacaaacaactaatccagcaccaaattccttcaccgttacccgaaaagcagcatttgttattccagccataggagccacaacaacccgatttggaatttccacattgccgattttccatgtaccgttcaatggtttcactgctattcccccaaaatttcgtgtttcaattcataaaggtctgcttcgctatattcatatttgttgttacaaaaagcacagaccgcttctgcaccatgatcttgatcaatcaattcttgaatttgctccgctcctagtgtaataatcgctgatgcaaatttttcttttgaacaatcacatttaaattgaacagacatggtttctaaaaattctacatcatctgttgctaataacttctgcagaatttcttctggcgtctgaccttcatctaacaaggtcgaaatacgggctgtttctttaagtcgcgcctcaatttgatcaataatctcatcactggctcccggcataatttggatcatgaaaccgccagccgttttgatagaatcatccgtatcaactagaacagaaacaccaaccgctgatggaatttgttctgatacagctaaataataggtaaaatcttccccaatctcgccagaaacaatcggtgtctgaccagaaaatggttctttcaatcccaaatctttaatgaccgtaaacataccttctgttccaactgctccacgcacatcgatcttaccgacttcattcaaaggtaagctgatatgtggatttttgatatagccttttacctcgccttttccattactatctacaacgatagctcctgccggtccattgccttctatttttacagtcattttatcttcgccttttaacgttgcgcctagcattaaagccccaatcatcgtacgtcctagggctgcagaagacgtattccatgtatcatgacgacgctgcgcctcagcaatggtttctgttgcattaacagcgtacgctcttacaaatccctcataggctaatgttttcactaaatagtcactcaatctatttgctccttaatattttatattattccttgtttttactcgtgattgcatcatactaggtgttcaagcttttttcaacttcttcgtacgacgtcatatggaaagtttaacaatatttttcaatcaaagcgttagctaaatgtagttttgagcaacagatatttttacacaaatcccctaataatttgcaagtctataactagcctctcattttcgtagccttgtgttctatattcaaacctattcaataagtcgcagctttaacaactcacatcattcttaaccgttctaccaagttctttcaccataattaaatccgtttgcttatctattccgatataaaaattatgtgtcccaatttttctaaaaccaaacatttgataaaaacgcaacgcattctcattctcttcccatacacctagccagataagtttacgtctctctttagtagcaagttcaatagcaaactctaataattgtcgacctaaaccctgacgcttgtattctttacggatataaatccgttcgacctctagtccattccgatctatcttctcagtttgcgctaaatcgatattcaattttaaatatccagcaagttgattatctaaatagataaaaaagaaacgtgaatttgaattcatcatttccttttttaatttttctaaatgatacgcttcaatcaaatactcctcaagattatctgaatcattttgctcagcaaaagtatcactgaacgtttctgtactgattttttgtaattcgagcaaatctttaattttgcatatacgaatagatccttccatctttatcatcctcctatattaacattaacaatctgctttattcgatattcctctttaaatttcctatacgattctgacaaataaaaaacaaacggcatatcctaaggacatgccgtttcgctttattttactcttgattatcgtttgtatcttctggttcgattttatcatctgaatctttatgttcatttgctttatcttcagcctgtttttcagcatctttttcttccaaagcacgttttgcttcttcaaatgtttgagcttgagttttttcacttggataaagactatcagaacctgcaggcatttcgcctgtttcaaacaatgatttgattgctttggcatccagtgtctcgaattccaataatttttcagcaatcaatttatgctgttcacgatgtgtctcaatgatttcgcgagctttatcatgtgccgccatcaagatatttcgaacttcttcatcaatctcaaaagcaacttgttcagaataagcttttgtttgaccatagtcacgaccaacaaagacttgatgatttccttcgtattgaaccggtccaagcttctcgctcattccgtattcagttaccatgcttcgagctaatccagtagcttgttcgaagtcatttgatgctccagttgtttgagcattaaagacgatttcttctgctgtacgaccacctagtaacccaacgatttgctcaaacatatcgtctttcgacatcaacatttgatcttcttttggtaaggcaatcatatatccgccagcacgtccacgaggaataatcgttactttatgcaccacacgagcacggtttaagaccataccaataatcgtatgaccggcttcatggtaggcaaccatctcgcgttcacgtttactgatgacgcggtctttcttagcaggtcctgcgataacgcgatcttctgcttcatccacgtctgaagcgtcaatttttttcttattacgacgagcagcaactaaagcagcttcattcaagacattttctaaatccgcgccggcaaagcctggcgtttgttgcgcaacaactttcaaatcaacatcgtctgccaaaggtttgttacgagcgtgcactctaagaatcgcttcacggcctttaacatctgggcgaccaactaagatttgacggtcaaaacggcctggacgtaataacgctgggtccaacacatcagaacggttggttgcagcaatgacgatcacaccttcatttccatcgaatccatccatttcaacaagtaactggttcagcgtttgttcacgttcgtcgtgaccgccgcccatgcctgcaccacgttgacgaccgacagcatcaatttcatcgatgaagataatcgctggcgcatttttcttagctgtttcgaataagtcacgaacacgagaagctccgaccccaacaaacatttccacgaaatctgaccctgaaattgaatagaacggcacacctgcttcaccagctacggctttagcgagcaatgttttaccagtcccgggaggtccttcaagtagtacaccagctggaatacgggcacctaattcgacgaaacgacgtggatcttttaagaattccacaacttcgactaattcttgtttttcttcttcagcgccggctacgtcagagaaacgtacacgattagcttttttgtcagcttctttagcttttgatttaccaaagttcatgacacggccattgccgccgccaccgccgccttgttgtcctagcatcatgtagaagaagaatatcataatcaagataggcaagaagcttactaataaagtaacccacataccgctgcttgattcttcctcaatcgttattttaactttattttcttttgctaggtcattgacctgactcagagttgaatcatttggcaaaacaatggttgagaaatgtgtcgtttttgactctgttcctcccccaataatgctcaagccgccggaattagcaacttcctgttttgccttatactcaccagtgattttatagacaccaccagcaggctgaatcttgatgttcttgattttgccatcttgaatctgttccgtaaaggttgaatactcgatatctggcgaagctgatttgttatctccaaaaaggaaataaacaaccatgaccatagccaagatgacgagaatataatagagagcattttttactcccttattgtttttgttcatctgcgtcctcctcgcacttgttagcttattagcttgttaaaaaagttttatcaattttgaccttttaagtatatcatactgtgattttttcggtcactaatttgattgataaatttccggcttcaatacacctacatatggcaggttccgatatgcttcagcatagtctaaaccatagccaacgacgaattcattaggcacatcaaaaccaacataatcagcatggatatccaccacgcgtccttctggtttatccaacaatgtgacaattttcactgatttagctttccgatatttaaatagatcaactaaatagccaagtgttcgaccactatcaataatatcttctacaattaataaatcgcgaccttccacattggtgtctaagtccttgatgatttttacctcgcccgaagaaactgtctgattcccgtaacttgaaacatccataaaatccaattctaaatgagcatcaatttcacgaacgatgtcagccataaaaggtatggctccttttaaaataccaactaccaatggatttttatcggtataatctgctgttaattgtacgcctaattcgacacagcgtttttgaatatcttctctagtaatcaatactttttcaatatcttttgctagcatgtagaaactcctttcatttcgctacttgaagcgtatagtcaagtatgtagtgtattctatcagtttcagttgcaatactcaaataggaattgacaaaaggcaaaagcgctacaatttctccagcagaatcttccaccacccatgcttgatcacggatatccatcggagtttttttatcaataaaataacggctaatgcgttttgttaatgtttcagtcaaacggattcgatcaccatcttggcgacgacggatcgttagagggagtttaactgtgagtggtaacggaacttggtatacacctttattcgcgactgtatcacttctgcttaatgcaatcgtttcattgtcggataagaaaaagcgttcgttttctcccaaaaaatattttttctgatggacaattatcttcttttccaaatagaaatgttggtatctacgagaaaattgccagccctcccctaaatctatgacccattgactgacaggacgctggatttggtctagcagtaaaaacaattgtcgctgtgagacgactagattcgtttgtagagccttctgctgaaaaaatatcgacagaaaataataacgagcacccgtatccgtgggaagcgtatcagctgaaaaaaaccacctctgtccatcgtattcgatatttcttaaattttcttttagcgcctctgtaattaactgatctgcccagagcaattgctgatggaactgttgagcattcgctaatatttgcggattttctttttttaactctggtacgatattttgacggattcgatttcgaaagtagtcttgtgaaatattcgtagcatcttcaaaataagtcaaattcttctcttcagcatattcataaagcgtctctttcgagaaggacaacagtggacgcagcaatattccattaccgaatgtttgctggcgcacgattccgctatgacctgtaaacgaaccgccacgcgtcaaacgcattaaaagtgtctctagctgatcgtctccatgatgagcagtaagaactagatcatagttttcctgctccataatttccttaaaaaaagcataacgtagactacgggcagcagcctcaacatttttcttagcaggttttttccaaatttttaaataaaaaggtatgtcttgttttcggcaataatcatgtaaaaaatccgcttcaaccttcgattcagtgcgcaattgatgatccacgtgagctacaccgatagtcagtccttgccgctgcaatagatgcaaaagaaccattgagtcaacgcctgtagaaactgctagtagtatctttttatcagcagttaattcaggatttttacgaaaaaagtcttgtttcatgtcaaactccttgatttataagaatactcaatttctatcatatattctctaatcatactttccaattattaattcattatgaacttcacttgtatcgattttatcgccaagtaatcaatagaatctcttttcctttaaaaaaaggagctgtgacaaaagtcttgtcacagctcctttttccgaacacacgttgttccagaagtagcttcttaggaaatataccgaaatttcttatagctgagcacttctgtcacaaccttcctttattttaactacggcggcctccgcgaccaccgcgttttccttcagtattacgtttgatcgatgacaagcgatcatcgctatcctttaaaaaggaactcatcaatgaatcgaagtcctgtttgccgctattttgtggtttgcccttaggcgcaggttttgagcgattattatcacgaaactcacgtttaaaaggtttcttttctggctgtggctgatcttgggctttgcgaatcgaaagaccaactttaccgtcgtctccgactgaagtcactttcactgttacttcatcgccgacagttaatacatcatgaatgtcttttacgaaaccattagatatttcactgatatggactaagcccgttttgccctctcccaagtcaataaaggcaccaaaattggtgatccctgatacttttccttgcagcttagctcctacttcgattgacataaaaaaattgttcctcctaatttttttccaatttatttaaaactgcaacgaaatttatttagcagtttcggatttaacaacttcatcagcagtttgtttatctttattagatgtatttgctgaatctggtaaaacaaaaattaattcaccatcttttgaataatagaaacgactacgggctagcttagccacatagttatcatctttcaagagctttacgtcttgccgcaagtcagcgactcggtcatccactttggcagactcagcaacagttttgactttaatctcatttagttcacttaaatgacgttgctcattaaagatttgaactcccatgacaatagcgacaaaggcagcaatagctattaaagctgctaaacgacgacgtttaaaaatcaattgacgatgttgcttttgaaatttaagatattgctcttttgcatatggcgtatctaacgaagcaattttttgcgtctcgttttcattcattactgctcgctccttacatgaaattctttactattatatcaactcaagttataattgtctatttgaattacccctaatttccgttattttctacacgtgtctcactaatgatacggtacattttagctgcgtcatctttttttgttgattcatgcagttcttctacagcgacctctagaattttattcccaaattgtatacgcagttcatcaccaacttttacatctgttgaagattttgctaattttccatttacttggattcgccctttatcagcaacttctttcgccactgtacgacgtttgatgattcttgaaatttttaaaaatttatctaatcgcataaattatctccttttccaatttattctcaataatttacttccaaatggcaacatcagccattctcgaatggttaataaacgtaagtggatagcaaggattagaaaagcgctccctcctatcagtacaccaaaaacagcagccactaatgccaaactccttttatagaccattccaaaaataatgttgataccgccataataacataagagcactactaccatgccagttaaacaaataaaaagttttcgcataaaatgacgctgagtcccataattccgtatttcatgatcacaggctaaatgcaagataagtaaagctaccgctaatcctaataatgtcgacaggctggctccaactgtaccaaattgttttgtcagccctcccgtggttaccatttttattaatagtccagctcctgccgcctgtagtgaactacgatattcgttttgactttgtgcaatactttgataagcctgtaccattgccatcaaaaaaatcgcaaaaacaaacaggactagaggactattcccttgataatctttgaatagcgcataattcacataaggaagcagcatagctaacccgatcgaggctgctgcaccaatcgcacaagtcaaacgcaaaaaaatctgactcgttttcacaaacattccacgatcccgactaatcaaataccgcgtaagtaatggtaaaaaactagaactcaaggctaaggctatcactaaacctaattgaaccaacggctgaccccgatcataaattccttttgctaactttgcatcatgttcgcttagtccaaaatcaactaaggctttttttacggtaaaggagtcgatcaattgaaataaaatcaatagaccgctgtagatcgtcatcaagcctccctcaagtactaatcgttttcctagcgttatcatctttgtgccaaaaaccggtactcttcgtaaaagactcgttcctaaaacctttcttcggtaataccacaaaactagaactgccgcaattccgccaaccaaagcaccagacatcgctacttttcccgtgtagtaaacatcccagccaaattgcttaaatgaccaagcagcaactacgatcacacaaacacggatcaattgctccaacacttgtgatacagctgtcggcaccattaataattttccctgaaattctcctcgagtaatcgagaggaaaggcataataataaaagtaaaggacaccacttgaatcaagggcgctaaatttctgtctcccatccaatttgctaatggttgagacgagaaaaaaaacaacgcccacaagattaaaccaaaagcactgatcaaaggaaacagctcttccagtgctcgacgctgttctctaggttctttttgctctgctacatattttgaaataaactgtggcaaacctgacaacgccaaagtcatggcaataccataaattggataaacctgctgatacacataaaagccttcatcacccgcaaagttttgatagggtacacgataaatagcgctcaataattttgctacaaaagatgcggcagttaagacaaaggccccctgcatcatcactcgcatttctttattcgccagtgcctccaccacctattctttgtatttttgttctcgtaatgcacgaacaaatttgctgatctctcttagccaaatcgcttcgtccatcgttttttcaactactagttttatgaccatatgatccttttcaacgcctaaagttgctttcatcttcgtagcgctcaatgcttcgaatagctgttcaactttatatgctttcgtcccaaccttgcttaaagtaaagataatctgctgctgacgtttttggatactttcaactagcgcacgatcaccgtccatcttgatttgtccgatgtttaacaagttcgctacttcatctggataatctccgaaacggtccactaaatcagcttctacctcgtctagcatctctatactttctaactcacgaatccgtttataaatttcaattttttgtcgttcatcttcgatataagttcccggaatataggcatcaatccctaagttgatttcgacggaagtacgttcaacctgggtatttttcccttgcttacggtcgactgcttcagacaacatttgtgaatacatatcaaatccgaccgcatcaatgaagccatgctgctgcgctcctaaaagatttccggcgccacgaattgataaatcgcgcatcgcaattttaaaacccgaacctaattcagtgaagtctttaattgcttggagccgtttttcactgacttcattcaagattttttgtggctcatacataaagtaggcataggcaatacggttgcttcgaccaacccttccacgtaattgatataatgttgacagccccatataatcggcattctcaacaaacaatgtgttaacatttggaatgtcgacacctgtctcaataatcgttgtagtaactaatatgtcgtattgtccatcaatgaaatccatcaatgtattctccaattgaacttctgtcatttgcccatgagcaaatcctatttttgcgtcaggaactaacatttgcagttcttccactttccgttcaattgtctctactcgattatagagataaaacgcttgtccaccacgtgccatttcacgttcgattgcttcgcggattgcgccaggattcgtctccattacatatgtttggatcggataacgattttctggcggcgtttcgattacggacagatcacgcacacccaacatcgacatatgcaatgttcgaggaatcggtgtcgccgtcaacgttaacacatcaacttgtgatcgcagctgtttcaaccgttctttgtgttttaccccaaaacgctgctcttcgtcaataatcaacaagcctaaatcagcaaactgcaaatcctgtgataaaagccgatgagttcccaccacgatatcgatttgtcctgtacggatttgttcgattgtttcattctgttgtttttttgtacggaagcgactcagcatcgctacattaacgggaaaattctcgaaccgttccgtcattgtatcaaaatgctgctgagccagaatcgtcgttggtacaagaaacgcaacttgtttgttttccttgattgctttaaaggctgcgcgtaatgctacttcggtcttaccgaaaccgacatccccaactaataagcgatccattgggcgagctttttccatgtcgtgtttgatctcagcagtgctacgcagctggtcatctgtttcactatatggaaaggcgtcttcaaactctttttgatattcatcatccggaccaaaggcatagccacgttctgcttcacgtttagcgtaaagctcaatcaaatcatctgcgatatcttcgatttttttcgatactttactcttggttttcgaccattcactaccgcctaatttattaatcttcggcggtttcgcctcagaagagacatatttttgaattaggttcaattgggtcactggaatgaatagtttatcatctttttggtatacaattgacatgtagtcttgatggactccatcgatctcaatcgtctccatcccaatgtatttaccgataccgtgattggcatgaacaacatagtctccggcttttaattcattataactctttaggcgttctgcattggagattgtctgtcttcgagccctcttttttgtgactttttgaaagatttcacgttctgttactacaactaatttgtcctgcggtaattcaaatccattcgtcaagctacctgtaacaatctgggtctgaccaatcaataattgatcaggagtcgtttgaactgctttgatttccacatcatgaaattcctgagtcagcttttcttgccgttcttggtcagatacaaggaataataccgtttgttcttgcttttgccaacggtcaacttctgtttttaataacggcatttgtccaaaaaattgctgcattgatcggtattggaaattatggatcgcttcaaagcgtaaattccccatccctttttgaaataacgaaaagaagctagtcactaacttactctttttgattaggtcatgagcattcataccaaaagtttgatcagaaaaaacacgcaattcttcaatcttttgcgtatgccattcggcctcttcccgctccatttcgcgttgtgcttccatcatacgaggataatcgtcgacaaatagctgtgcatctttggcaaaatgatccagtagtgaaattttttcctcgtataataaatctgtgtaatacttagcttgctctgtcggaataccgtcttcccaagaagcaattaattgtccaaaatagtcatttaagaaattgtaatcttctttatctttagtgacggccaaacgattttgcaagagctggtttacttttaaagccccttgtgccaaatcgtgtgcagaaaaaactagatcagtcgttggtgtaatccatacctcatttagattctctaccgaacgttgagtctctggttcaaaataacgtaatgaatcaatttcaacatcgaatagctctacccgaacaggatattctgtcgttaagggataaatatcaataatacttcctcgcatgctgaattcaccaggtttaccaaccattgtttgacgttcatatcccatcaatactaaacgctgcgctaagttctctaaatcaacctcactgccaattttccagtgtaattggttttctctccatgtctcgattgaaggtagatatttacgtagagcagcagcaggcacaacgtatattccattttctccttgtgatagagcctgtaaagtagaaacacgctcagcgcgtgcttctggtgacgcaaaggccatctcagctgaaagcacctcatccactgggaataaatgaacatcctcgacaatctgccgtagctcatcagcaagttgattactgtaatagagattcggaacaactactactgtttgtttttcttccgcctgatgtgtagcagccattaccaaagctttcgccgaacctgaaagtccaatcagcaattgccgctttgctttttcttctaaattagactgccattcttttactagtggcaactgatttataatttcaatcaaattcattttcttactccttatctacttctaatcttcaaaattctgaataacgttgaaaaagaatcagctttaattaaaccgattcatcgtttttaaaaaatcattacctataacaaaatcatccgctgcatcagccgcacgagcaacactatccgcgattgtcatttcatcttcttttccaaatgtgctcaatacatgatttaccactgtttttccatttggacgaccgataccaatcttgatccgattgaactcttgcgtcccaatatgtgagatgatactttttaatccgttatgcccacccgcactgcctttttgtctcaagcgcagtttgccaagatccatatccaagtcatctgctatgacaactaattcctctagatagacgccgaaataggtcattaacggaccaactgctcgaccggattcattcataaaggtcattggttttaccaacaatactttctccccatctacgaaataatcagtcacttctgcttcaaaagcattctttttgaaaactgcaccatgctccgtcgccaatcgatccacaaccataaaaccaacgttgtgttttgtattttcatatttttttcctggatttcccaaacctacgatcattttcatattgtttcgcctcgttcttttagatatgtaattccttcttgtagcaaaggaatgtcacttttcatctgcatgacaaaatgctggatagtcaaatgactacccagtccaaatttttctttatacagtataacacaaactaacctgtagtgaccgttttcagcgctttaagtctcttataagtttctgttatttttgaaaaaagttaatagtaccagcttcttgagctattaacacatgaagcgttttcttctgaaacagctaaaataactgtattattaatgagtaaaatacgtgacaagtttcattaattagtgttatcattcctctggaaaaacaaatattagaagggattggtacacatgactgcaacagcagctagtaaaacccatcaaaaagtaatgttaatcggagacggcgcagtaggatcaagttatgccttcgctcttgtcaatcaaaatatcgctcaagaaatcggtattatcgatatcgataccaaccgtacacaaggagacgctatcgacttatcacacgcattagcctttacgtcacctaagaaaatttattctgcttcttatgaagattgtcacgatgctgacctagttgtcattaccgctggtgcaccacaaaaaccaggcgaaactcgtttggatttagttggtaaaaacctacgcatcaacaaaagtattgtagaacaagttgttgcttctggttttgacggaattttcttagtagcagcaaaccctgtagatatcctaacttactctacttggaaattctcaggtttccctaaagaacgcgttatcggatctggtacatctttagatacagctcgcttccgtcaagcaattgcagaactagtagacgttgatgcacgtaacgtccatgcatatatcttaggtgaacacggtgattcagaattcccagtttggtcacacgctaacgttgctggcttgcaaatttacgaatgggtcaaagacaacccagaagttgatgaagaagaattagttaacttgttcttcggtgtacgtgacgctgcttatgaaatcattgagaaaaaaggcgcaacattctacggaatcgctgttgctttggctcgtatcactcgtgcaatcttaaatgacgaaagtgctgtattcccactatctgtttatttagaaggacaatacggacaaaatgatatttatatcggtgctccggcagttatcaatgctaaaggaatccaaaatattatcgagattccattaagtgatgctgaaaaagatcgtatggatgcttctgcttcccaacttaaagaagttatggacaaagctttcgctgatcttgaagctgaaggaaaatagacttttcactaccgcaaagaatcctcatattctttgcggtttttttaatatttgctaacgtttcaagacaaatcactcgtatttcggctattctgtggtatatttatactcggtatatcatttaaaattagtagctattatatagataaaattgctttgatgattaatgaagaccaaatacaaaaaagccatgaggagttatttcgatgacaagaaatgaaaaaagaaattctcgtagccgaacacggatcggtgtaattgttgttttaggtttattggtagttttggttggcggatacactattcgcagtacatattatgctcaaaggtttctcccaaatacggtagttaatggagtaaaaatcaataatcttacggtaagtgaagccaatcgaaagattacccgtgagctatcggactcacctttcctaattaagattaacaacgaaaattggaaagaaatcaatcgcaaagatttaggctggcaaaatgattatctgcccggtttaaaagcattgcagaaaaaacaaaatccttttagctggggcatgcaattagtctccgcagctgagaaaaaggatgttgacggcaataccttggacgaaacaaaattgaatgccgtcggtgaagcagtccgagcagaactaactcaaacaaacacaactcgaacagctacagaaaatgcaaaggttactcggacaaatgaaggttttgagataaccccagaaaaacaaggaaatacaatcgatattgacgctgccgttgacgctttcaaagaggcagcgaaaaacgggaaacatgatattgatttcgataattatctaactaaacctactatcactaaagatgatcctgagttgaaaaaaacgatggacaaaatgaatgctgtagcaaaaatcaaagcgaactacaacatcaatggagaaaatttccaaatccctacagcagatatcaacagctggttaattgatgacaatggtacaatgtcgctagaccaagaaaaagttaccgcctatgttactagtttaggtgaaaaatataataccagttcaaaaccaactgaattcaatagtactcgccgcggaaaggtttctgttccggcaggtacttacagctggactattaacacttcagcagaagttgtagctttaacgaaacaaatcttagaaggtaaagattttactcgctcaccaatcgttactggtgcaacaacagctgacaaacctctaatagataaaacgtatattgaagtagatttgcaaaatcaacatatgtggtattacaaagatggcaaagttgctttagagacagatattgtcagcggaaaaccaagttctccaacgcctccgggtgtcaattatgtttggtcaaaagagaccaacaaaaccttaaagggaaaaaatgatgacggaacagattatgcaagtccagtaaaatactggatgccgattgattggaccggggtcggccttcacgattcagattggcagcctgaatatggcggggaactttggaaaactcgcggctcccatggttgcgtgaacaccccgcctgatgtaatgtctagactcttcgacatggtggaagtcggtacaccagtattagtattttagaaacgaaaaaccagcgagaatttcgctggtttttttattcggctcaattgtaatattagctctaataatcaaagctagatgattcgctgagtttataattatcctgctgaagtgaacacttctgaaacatcgtcatcatcttccaacttctcaactaaacgatctaacttttcttgttgctcttcatttaatgcaactgtggtttgagggatcatcgtcaattctgcctgtgccagagtaaatccatcctcttctaagtgatcccgcacactggcaaaatcttccgctgcagtatatatttcaaagacttctggtgaagtctctagatcttctgctccagcttctaatacatcttcaagcattgtgtcctcatccacagataagccctcacgctcaatagcgatatatccctttcgatcaaacatatagttcactgaaccagtttctcccaaattcccaccatttcgagtaaacgcaacacgtacattcgttgctgttcgattacgattatcggttaaagcatgaactaatattgcgacaccaccgggcccataaccttcatacgtaatctcatcataatgttcaccttcgcctgctgatgtcacttttttgatcgcacggtcaacattgtcattaggcatgttagcagatttcgccttgtctatcaccaagcgaagtgcgggatttgtacttgggtcaggtcctccagctttagcagccatatagatttcccgcgacattttttgaaagatttttcctcttttcgcatcttgagcatttttacgcccttgaatattatgccatttactatgtcctgacatggtacattcctcccatatttttggtctctattattgtctacctgaaactactttccgtcaagaataaacactattagcgctttttacgaatcgtctgataaacaataataattagacaagcagtcagtgccccaaaagaatctaacataacatcctgaaataatggtgttcgtccaccattcagcatttgatgaaattcatctgttgcggcataaccagttgcagccatccatgcgaaatacagacctaagactgatgatttttgctttaatttcggggataatcctaaatataagctgccacctaaaataaaataagtcataaagtgtgcacctttacgaataaaaaattcaacaaacttaacataaccctttgctgaaatacttacctcactacctgcatagtcaaaagaaatcttgctaaaaaagccttttagcggttcgttcactaatactctttgaattagaccaacttggctttgctgttgataggtcattgaagaactaataaatagaaccagcatcatcaaaacagcaatacctaaataaaaatttccatttttcaattgtttttgcattgcatttcctccatttaaaaaaaccggtacgaaattcgtaccggtcacgattaattaaattagcttacatacgaaccgcaaagcttggcgcatagtaacttacagaacttactgtaactgtttcacctggttgtggtgcgtggatgtattgtccaccgcccattgcaatggcaacatgatacgttccaccagggctaccccagaagtataaatctcccgcttgtgcttcgccaactgagatacgagttccagctgattcttgaggtactgtccagccaccgatttcgcgtccagtagcttgacggaacacgtatgaagtaaagccagagcagtcgaatcctgcaggtgtttttccaccccacacatatggcgtaccaatatatttcatagcttccgcaactacgcctgaaccatttccagatggtgctggagttggtgttggtgtaggcgtcggtgcaggtgttgatggcgtttggttattcgttgttgatgaagtcgagccttgattatttgaatttgtatttcctgtatcagactcagaaggcgttgttggtgttgctccgccgccttggaaattatcttcatttgaagattctgtcgctgaagaatccactgtgcttgattgagtttgctcagttgaagaagattctacagtagaactagaactttcagttgtagtcgtgctagccgcagcttcttcttgcgctttacgatcagctaccgctttagcatctgcatctgctttttcttgtgcttcagcttctgctttcttagcagcttcttgtgcttccgcagctttacgagcttcttcttgaacacgttgttgttctttgatagccgcttcttgtttttctttcaaacttgctttgtcgctctcagctgttgcttgttcagcagctaatgttgttgtttgaacatttaaatcagcttgcttagcgatcaaatcacctttttgactttctaaagtcgcttggttagcagcaatctgctcttgttgttttttattttcagcttgtttttgttcaacttctgctttgtccgctttttgttgttcaactaaatcgttatttgctttaacgatcgttgtcattgcttgaacacggctaacagcatcagtgaatgattcagcattcaatactacatcaataacatttgtacctgaagattgtttaacttgtgtatcacgcgcttgctctttgattgcctcggagcgtttttcaatacgtttatctaacgtttcgatttgcttttgtaattcttgagatttttgtcttagagattcttgttcgtttaataggccttgagccttatcgttaattgaagcaacttcaccttctaatgcactaatttgtgactgcgcatcggtttgttggttttgtaaacttgaaattttcgcatcctgatctgcaattttactatcaaattcatcggcagaagctgcggctggagctgctaatgcgcttaatgttactgaacataccattaatgctgataacaaactttttttcactcttatgtcctccgactattttttaagtttaattttaaagttttgatttttattagacttttttctaacacattcatgagtttaccacagctgtatgtcatgcagataatagctttgttacaaaaacatttcaattcactattttttagttacaaattttgtctacaaaaaaacagaagaaaatttcttctgttttttttgtttattaaaataatcggattatcccttatataccaagctcttcttcgggtggcccaatcaatattttttctaatggaaagattaaaattacaaatgttagaatattaaaaagcaacgttgggcctaaatatcgcggaacaaaaaaatcgctgctgacccctgttagtccgaaaacagattgcaataataaactgattaattcaaagagcgttacactgattacaacagtaaaaaagagcgttaaaatattttgctgaatggtttttttaaaaaaataaaataccatgactagtaacgggaaaatcacagcatagattccaataacgccaatataatacagatcatacaatgtccccaagactaaagaagttcctaataaaaaacgctcgttaacaacacgagagacaatcaaaaggaccaacagcgctaaatgtgcgtttgcaacatagatattgtctgtccaagctgcgataattcgtgtgacatgggcatctattaaaaataagaaaaataataagaacggggtaatatattttagagttgttctactaatcattctgtcgctcccgccattctttgaataatcgttacgactgaaatatcatacatttgtgcatagggtttgatgtaaacttcacgatttaacccatagctgtctggcttcacttttacgaccgtaccgatggctaaatcagctggtgagttcccacctaacccagaagtctgaacgacgtctccttctttaatatcttgatcacctgtaatttctgacgcaattaattgttgcgcctttacatcatacttacttaaaacaccaaatgaattccctttatctgaacttattcttaccggaaaatgattactgcttttattatcagaggttaatagttgaattttggaggaatgagcattcacttccattactcgaccgatcaaaccttttttggacataaccgccatattcccttcaactccgtcactgctgcctttatcaacaatcagcatatcttgccaagtatcaggagaacgggtgataacattagctgtaactttttcataactggtcaacgtttgattcaactcaagttcattttttaaacgttcgatttcttgagcttggttctttgtctgctgtttcacctcatcgtattgatcaatttcattctttagtttttgattttcgtcatacgtattaattaaattggaaacagctgctacaccgctaccaagccaacgtcctggtgcagtaataactttatcaaccacgctgatagtatcattaatggtcgattgaacaacatttgtatcactatccttcgcacgatttgctgcagtaatcgatacagttgctacaataataataacaacaattagtatgataataatattcttattcggattaaactttctcacgtaggcacctctgaacgctataatatagaacaaattttaacactaaatgaagggattaaaaagcttgggcgattgattttagagaattttagtatctctcataaacaaaaaaagaagcagtgaactcgttcccaaaaaacgattcaatactcctcgattaaatatctttactttgtatcacagcaatcagaccagttgaaaaacttacctcagcatttcctgttaaaaactcattgctagctaagctagttggctgtagaaaatcaacgacgtcaagttcatattttacattctttaaagtcaatttacttacaggagtcaagcaacagaaagctagatatttcatagacggaattttctcaataacatggtttcctgaagaaatgtaatttaccgtatttcctttatctgctatggtgatctgagacaaaaaaggttcaaaccgtggttctaatcctaaccacaaattcgctaataagtgatccaaacgtccgcctgtcgcaccaattaaagttacatccgctttaggatatcgttcaaaggtacgaactaacgccaattgtgtatctgtatcatccttttcagcaggtgaggtttgcacttcagcaacttggctaaacacttcctttttttcagcatcatttaacgaatcgaaatcgccaatcgctaaatcaggaataattcctcgacgcaaaaggtatagattccctcgatcaattccgatgattttatcaaaatcatttgaaatagcaggccagtgattaggatcaccgcctgccacaagtaaagttttcattattcgatagccgtccgcagtgcattgattttttcttctggattttccgcgtcatagatgtatgaacctgccacaaaaacatctgctccagcttctgcacattttcttgctgattctggctgaattccaccatcaacctctatttcataacggtaaccatgctctttgcgcagccggtctaattctgcaattttttcaacttgactctcaatgaatgattgtccaccaaaaccaggattgaccgtcatcactagaatttgatctacatcatttaaaatgtacttgattgattctaccggtgttcctggattcaatacaacacctggttttacacctgcagccttgatcatttgaaccacgcgatgaatatgcggtgtagcttctacatgagccataataatatccgctccggcttttgcaaaatcattgatataattttctggattagcgatcatcaaatggacgtctaacggtaatttggtaactggacgcaatgcgttcaccacaacttgaccaaaagaaatatttgggacaaagtttccatccatcacatcgatgtggatgtagtcaacacctgcatcttctaccattttcacttcttcacctaagcgtgcaaaatccgcacttaaaatcgatggggcaattttcatagtcgtttactcctttttcttttttaatgtatttattttccctttcagaaaaaataagtctgattttcaagccgtatatcatccaactagcgccctacaacattgaaacgtactaatatttttaaggtcccctttatacaaaacgtactgcgaaaagttggactgacatcctttttctttttaatgtatttattttcctttaaaaactacttattttttttgtagataggtcgacgtttttcgatttcttgtagaaactgcaaataatcatcgtaacgactccgtgcaatcgttccttcttctaaacgatgctttacttcacagccaggttccttcacgtgtcgacactcacggaaacggcaattcggcgcagcttcacgaaattctggaaattgttttggaagttcatcagctgtaatttctaaaaaatcaatcgaactgaatccgggagtatcggctaccaaaccaccaaataactctaacagctcgacgtggcgagtagtatggcgtccgcgacctaatgaatcagatatttcccctgtctctaaattcaagtccggcgaaacaatattcaacaatgttgactttccagctcctgattgtcccataaaaacggttaatttatctgtaaataaatttgttaatttttgcttatcttgttcaccatcaattacaggataaccgagcggctcataaactgaacggatttcatcaaccaacatttcatcagcgactaaatccgtcttagacaaatagatgatcggatgaatatacttattttccaaagttactaggaaacgatccaatagattgtaagaaaaattgggctccactaggctagtcacaatcacaccttggtcaacgttagcgactggtggacgaaccaaatcattttttcttggtagcaattcaagaatatagccttcactattttcttcgctactaaaaacaacctcatccccaactaagggtgtcaattttcttttacgaaagtttccccgtgcgcgagtttggtaaatttctccttcactagcaacataataaaaaccactcagggctttacgaatctgtccttcgatccgtctcatctcctttttcttttgaaaaattaattcaatctacaagccgtgtactatctttacaaacatttctaaaatcatcttacaattcagctttattgtagcatacttcaaatctaatttcagtacaaataacctaaaaacctttcctaaagaatttaggaaaggttttttctacggtactgagattgtttcagccttttgaacatttttcgtgactgctgaattaccgttacgttggacttcaatggtggcagattctcctttgataatcgttactgagacagactgttccattgagggggtatttttgtctaatttaaagtctaaagctcgtgttgaagttgcgttttttgcatctttcagcatcactgtaatcgtatcttgttgatcacctgaaccagtaaatttagcagatatcgtcacatcaaagcttgtctcttcattttctggtccctttgaaacatagactgttacattactgccaagctttatagaacctgctccgggatctgttcgaataacttttcccttttcaacatcatctgaaaattcttgttgctcagaatattttaaacctaaattggaaattgtactttccgccgtagctttatcttgaccagataagtcatttagtgccgcatattctgatcctgaactgacttttaaagtaattgtgtcttttgaagtcaatcctgttccactgacagggtcttgactgatgacctcgccagcttcaattgtctcgctatattcatctatccgtttgatttgatctattgtaatccctaattgcaacaggctttgttcagcctcatcataggtcatttgagaataatcaccgatttttattttttcaggaccgtctgaaaccttaaaagtaatctcatcttcttttggatcaagcttggtcccgctttgaggggtttgactcagaatttgtcctgctggaactgtgtcgtcgttgactttttcagaaacaatatttttttctaaaaaaccaatttccactagctcttgtgttgcagcatcaatcgtctgacctttatagctttttatcgtaaccttcttagtacctgagctgataaataaccgtacagaacgactctttttaatcatagtacccgcttcaggacttgtcttaacaacgtgacccttttttatcgtatcgctcggtacttctgatgttttactatcaacggtcaaatttgcattctttaacgcggttcgcgcttctgcttcagtcatattctcaacttgaggaatcgatatttcagcggaactggttagcagatacccaacaaccccgccgattcccaacatcagcaataagaaaatgataataaagcgcttcttaccttttttctttttcggcttttcttcgggtgcaggctgttcttctttaggtttttcagtctgcatatcttctggctgaattggcgtcaatacttttgtctcatccagcatcaccgttggttgccacggcaattcatttgcccgaccggatgttaatgcagttgaaagatccgctgccatttcttcggccgtcttataacgatctgccggctccttcgcagttgcgtgcatcacaatgttctctaatgcttgcggcacttcaggatcaaagccttttaccgatggcatttcgtcttgaaaatgcttcagtgcaatcgttacggccgattcaccgtcaaaaggaacactaccggtgatcatctcatacaaaataatccccaaagcataaatatccgattgctttgttgccatactgccgcgggcttgctctggtgatagataatggacagaacctaacatagaattggtttgggtcagagaggtttcagataaggcgatcgcaataccaaaatccgcgatttttaccacgcctgcctgatccatcaaaatattttggggcttcaagtcacgatggataattccatgtgcgtgagctaggctcactgcagatagaatttgttccatgatatctacaatcttgccgtaaggaatgtgctgatgcatttgaatatagcgtttcaaatccattcccttcacgtattccataaccaaatactgcataccgctttcttcgtccacatcgtaaacaccgacgatattgggatgaaccatttcagttgctgctaaagcttcccgttgaaaacgacgaatcgcagtttgatcattttgaaaatcgaagcgtaatattttgatggcaacatcacgatccaaaatcaaatcgtgggccaagaagacgttagccataccgccgctaccgatattggcgatgactttataacgtccattgaccaatttgcctatttcgatcatggacgagcctccccttcaaaatggatcagcaagacagtgatgttatctgcaccaccagcatcattggccgcattaatcaattgtttcgtcttagcttccaatgtttgatcactttccacgattgctaaaatattttcttcactaaccatattagtcaagccatctgagcacagcaacaaataatcgttctgatgacactgatgctttgaaatatctgtttggatcgtgccagcaattcctaccgaacgtgtcagtacattcttttgcggatggattgccgccatttctgcagtaatttctcccgatttcagcagctcattaaccaaggaatgatcatctgtcaattgctgcaactgattattttgaatcaaataggctcgactgtcaccgacatgagccaatacaaatttttcatccaacaaggctgtactgacgattgttgttcccattccttgcatttcaggatgagcaatcccttcttgatagatcgcttcattgacattttgaatttcagctgaaaaccatttagcggcttcttcaagctgctcaatagttgaggtcgaccaagcagcacctaatccgtcaaccgccattttactagcaacatcgccagccaaatgaccgcccatgccatcggctaatatcgctaaatacatacctgcttgattggtaaaaacatttgcatagtcttgattcatattgcgccgcttgccgatgtctgattgaaattgaatctccatctttttgtccacctcatttagctatttttttcgcattgcacaaataaagaagccgtctgtcataaacatttctgggtataaaaccaacatttgttcatgaaccgctggctgtaatttcatctctaaatctagttcaattttttcaaattctgggtgagctgttaaaaattcagcaactaccatttggttttcttctttcgcaatcgtacatgtactgtataccataattccaccagatttcaatgtgggagcgcaattctttaaaatttctagttgaattttaggcaattgaacaaaatcttgtggttgtttttggtatttgatatctggcttccgccgcatcaagcctaaacctgaacaaggcgcgtccactaagatacgatcaaaagtttctggttcgaaggtttctgccgcttcacgagcatccatttttttcgtcacgacggtatcagctacacgtaatcgctccgcattttcacgaaccagctttagtttgtgttcatgaatatccagcgctgtcactgacccctcatcttgtaataatgcggcaatatgagtggtctttccccctggagctgcgcaagcatccaacactttttgtcctggtttgatctgcattgcttgagcgacaagcatcgagctttcatcttgaatcgtcagccagccattttgaaacaattcactaccagctaaaaagcctttatccgctacaatgccataaggcgataattcgctgatacgtgcttcaataccatcttcttccaaagcctcgatcgcctctgcacgtgttaaaaagcgtaaatcaatccgagcgctgacacggctaggttctaataaagacaggcctaatttacgcgtctctttctctccgatttctgcaacaaatttttctgtcagaaacttaggcaaactgatttcagttgctaatcgctcaattggatcttggatcagatctaacgaaggtgctccttcgcgttgaaatgagcgtaaaacgccgttaacgaatttccctgtaccaggattccctttagctttagcgatttccaccgcctcattgataatcgcatggtcgggaacgcgatctaaataaagcatttgatagatagataactgcaataagcttctgacccatggatcaactttttttgcttttttgataaaaggttcgatattatacgctaacaacagctggcgactaacagtgccgtatacaagctctgtcaagagtgctgtatctttaccgtcgacttggttcttttgaatcagttcattcaataataaattcgaataggcgccaccacgattgatccgctcgattgcttctaaagcggtgaaacgaacggagcgtaataatttctttggaatctttgccattagcccacctgctgcccttcagcaattgcttggccgctgccatttaaaaaggcttggatcgattgtttagctttgccggcaggttgtagctcgtcgattgctagcaccgttccttcaccgcatgcgatatgtaatgcttttttggtgcgagaaacaattgtccctggagcagcagtagttgtttcttctaatggagtagcgtggaaaatcttccagcgtgcaccttcataggttgtaaatgccacaggccatggatgcattccacgaacctgattatcaactgcttctgctgtttttttccaatcaatcgcttcttgttcacgactgatatttggagaaaacgttgcttcctcttcattttgtggtgtaggcttcaattcgccagagataatcttcggcaaggtctctaacaaaagctctttacctacttggctaagtttttcaaacattgtccccacatcatcttgttttgtgatagcaatttttcgctggctgaaaattccaccagcgtccatttttttgatcatttccatgatggttacacccgtttcggcttcgccttccatgatcgcataatgtactggtgcgccgccgcgatatttcggtagtaatgaggcatgaacattgattgcgcctaatttgggaacttgtaataatttttccggtaaaaattgtccaaaagcggccgtaatcaataagtcaggcgccaattctttaatcttctccatttcaggcgagccactaattttttctggctggagaactaatagattatgcttcagcgcagcttcctttactggtgtaggggtgataatcttttttcgtccaaccggtcgatcaggctgtgtgactactgctgctacatcataaccggcttcaatcaaactttctaaaatagggactgaaaaagcgggtgttcccataaatacaattttagtcattgacatgttcctccatataacgttctaagtcttctggtttaatcacttcaatcacttgattgataaacaattttccatctaaatgatcgatctcgtgttgaaaggctctagctaaatatccataagctgtaacttccatctctgagccttcgcggtcataataacgaacagttacttcatccgctcgttccacagttccgtatgtctctggaattgaaaggcaaccctctacatcaatattagttcccttgtgctcgatgatctcaggattaataaaatcaaagcggtctccttcttccacttctaccactgcaagacgcagatttttaccaatttgtggtgctgcaagcccaataccatcgtgagctaccattgtctcatacatatcgtctaacaaattgacaatctcgtcagtgatatattcaatgggttctgcttttttatttaagcgttcatcagggtgaataataatagggtaacgcataaattgctcctttcctgccttaaataaaatacataggttcgttatcaatagcgatcaacaaaccttgacgctgatctttttgactcacctgtaaaatatcttctaaggttgcttgtagtttcggttcatttttatatttgatgatcagttgataataatagcggtttttaatccgcaagattgctcctggtgtcggtcctagaagaatgctttgcgggcttagctgtttgcgcaattgttctgctaattggaaagctttttgcgcagctcgcatctcttcttgatgagagactgttactttaactgtgtaatagtatggtggataatccgtctgatgacgaattcgcatttcttgttgaaaaaagctttcataatcatgatgttgagcaagttggatcgtgtaatgatctggattaaaggtctggataatgacctccccggccttttctccacgccccgctctgccgctgacctgggtcagcaattgaaacgttcgttcgctagagcggaaatccggcagattcaaggcagtgtcagcattcaatacgccaacaagtgttacgttcggaaaatccaatccttttgcaatcatctgtgtgcctaataaaatatccgcttcatgatcaccgaaggccgtcaatatcttttcatgggctcctttgcgtcgagtcgtatccacatccatccgtaaaactcgcgcttctggaattaactcttctaattcctcttgaaccttctctgtacctgttccaaagtaacgaatcttatcctttccgcactctggacagcgacgaggaattccttcctcgtgtccgcaataatgacaacgcattgtctttgtgtccatatgcaaggtcaaagagatatcacaatttggacaaggcaagacgaagccgcagtcacgacacataacaaatgaagagtatccgcgacgattcagcaacagtacgctttgttcgcctctggctaaacggtcacgtagtttctcctctagcttttcagaaaaggaagagttcaatcgtcgctgcatttcttcacgcatatcaacaatttcgacggctggtaatgatgcgtgtgcatttgcacgttcattcagctttaataactgataaacacccttctgccctcgcgcccgagattctaaagaaggggttgcactccctaaaacaactggacaatcatggtatttcccacgccaaatcgctagatcacgcgcatgataacggggagattcatcttgtttgtagctagtctcgtgctcttcatcaatgatgattacacctaaattttctaatggtgcaaaaatggctgaacgagcacccactaccacatgagcttctccacgttctaacttacgccattcatcgtatttttctccttgcgacaaaccactatgtaaaacggctacttcactgccgaaccgtgccttaaagcgtgttgccatttgcggcgtcaatgaaatctctggtaccagcatcatagctgtctgaccatttgccagtacatcttgaatgacctgcaagtagacctctgtcttgccgctgccagttactccctctaataagaaaacctgatgttcatggttagcgcttttttgactgatcgcctcataagcggttctttgttcgtcgttcaaatctagtggcgaagttgggctaatttctctttcggcataaggatctcggtatttctcaatcgctacaaattccagccagccctttttctcagcttggttcagattggctaatgtaaaatcctccgccttcatttgtttcacagctattagttcttcatcgtccaactctgctaaaaaatctaacagttgttcttgcttataggaatttttccgtaactcggcttttaaactctctaaattttccagcgcaaaatttcgcttaatatagcgttccgtttttactttgttttttgtatgaacttcatagcgtaattcaatgataccttgttcacgcaatattgctagttcctttaaccagccttgtgcttctgcttcttcccaagtaagggaatcggcttcaccaaaatactttgctctgacagcagcgtcatctgttacaagaaacaaacgtttttgataatctgccttcattacgctaggcagcatggtttgtaagcacgtcactttgaaagcaaaggtcgtctctttcatgtaatccgccaatgccaataactctttgtttaaaacgggagttaagtctaacgctcggataatcggtttcaaattgtcaggcaatggttcagatgcagtctcaaagccaaccacaaatccttgaacatggcgtgatccgaaaccgacctctacccgcattccaacttctaccgctaattgaggcgggatcaagtaactaaatggctgatctgtttgcatcgccggtacatctacgatcacttgtgctaatttcattctttccgcctccattcttaaatattgtactcgattttaacgataaacacctaaattaatgaaactatgtaaggaaaactttgacacaaaaagaagggactgcgccaaattatttggtacaatcccatttacgcttcgtcagcaaaagaatctttgcctagttttgttcgttgcgaatccgtgcttctagatcgcgttgatcgcgttcacgttgcaaatggcgttcttcttcttccatttttaaacgttcccgtttgatttctggatgcggatcattaatgaccgtgccagcatcaatttcttctaaggcttgtccaacactttttactgattcaaatgaatctaaggttggttgcgcccctgcatctaattcatgggcgcgtttgctggctaagataactaaagaatattttgaatttacatggtctaacaacgtatcaattgaaggttttaacatcataagcttatatctcctttaacattttaatatatttaccaatcactcggtcaactcggtaatgttcactgacgatgatatccttgattcgatcgacagcattttgtacttgatcattgacgaccgcataatcatagagggccatcatttcgatttcttggcgcgcaacacgcatccgttcttcgatcacttcagggctatcggtacctcgtccaacgatccgcgcttttaattctgccagatctggcggcgttaagaaaataaagacaccatctggtactttttcttttacctgctgggcaccttggacttcgatctctagaaagacatcttttccttcatccaatgttttgtttacataagtaaggggcgtaccataataatttccaacatattcagcatattccagcatctcgcccgcttcgatcatcgcttcaaattcttctttcgtgcggaaataataatcgacgccgtctacttctccttttcgcattggacgggtggtcattgagacggagtattcgaactcattatcgtctctttcaaaaatggcttttctgaccgttccttttccaactccggaaggtcccgataatacaatcaacagtcctcgttcagacatactaacgccctttcatgctctttttcgctaacgcctattgtgcactttttttgtgaaaatttcaagaggcatcgttaagctgctccatatttcttatagaatccctcaaaactattcaacattttggatttgttctcgaattttttctaaaatcgtttttaattgaactacaatatccttaatctggatcgggctggattttgaaccaatcgtgttgacttctcgattcatttcttgcaacaagaaatctagctctcgaccaacaggttcggtcgcttgtaacaatttcgctaatttttctatatgaatactcaaacgatccaattcttcatgaatatcgcctcgttccaataaaatcgccagttcggttaataagcgatcttggtcgacagtgtttcccaaatattcctctaattttgcttggtatcgttgctgaaaatctgcttcatattcatccacaaatccatttaactctactactagagcctggaccttactgccatagtctattaaaactttttgaatacctgccccttcagattcacgactagctgctaattgagtaaaagcttcattagctactgcttggactaattcctccaacgtatcttcttctgtgggctggtcaatcaacgtcacaaaatcactttgttccatcgccttaactaggacttgctccaccgggaaatcaacgattccaaaatgttcctttccaccattttgcaactctgtaaccaactgctgcagtagcggccaatcaactgaaatctgcttgtttccactttttaacggggttaagttaatgaatacatcgacgcgtcctcgttggattttttccttcgcgatcttacgaattagggattcaaaagggtttaattccttgggcattcgaatctgcagatctaaaaaacgattattgacgctttttagttcaatagttaattcataagcatcattggtttgcacagcttgcccataaccggtcatactcttcatattatctgatcccttcttgttacatcttatttagcgtttccttcaaggcagcaaattcttcattacttaatgttacacctttgcccattttttcatgattgggagcccagtcccgtaaatcaaatttcggcggccgttcattccagctcaccaaatttaattccttgcgccagcccttcggattttccgatagtaccgcgatttcttcgacgatttcataattaaactctgccattatagttcctcctaatatataactaaaaattacttatcattgtacaaatcattaataagatagccatttcgcatgtattttaaaaaaactgccagcatggtaggtatcggccaacggcgataaaacttctcgagagaaccttgtagctgataaatttgtaaaacttgataataagtagaaaaaatattgtgattctcaataaaatcttcaatttgctcttgtactgaaaaattggcattcaatttgatcggcatctcaaattgccgcaggatagtctcgataaactcctgtggcgtaaaaacacgaactggcgaaacgtttacccaataggcaaaaaattccatgaatgccaaactaagcaattcgatcgggatattttgttgaaaaaactttttcagttctggataaagagtagctctattgactgcgatttccgttttgagataacgtaaaaacttcttagttattctttcaaaatctacgttacgactaaaaaagtagcgatatccctgcaattcgcccagtgctcgtttggtctccaaatagcccaagtcaatattttccgaagaacgcgcactctgaaacaacaataaatcccccaaactccaaggacttaccaaagacagttcagcaatctcatttggtagtcgatacttcttgtccaagcccggaccatgaacatctactatgatcacttccgttatcggtttttgcaaggcgatatccactggcaaattattgcggtagccgccatccacataaaattcattctttattttagccattgtcatcatagggaaaaaggaagcggatgccagcaaccaatcaattatctcctcttcacggcactcgttaagggaaacaaccacttcttgaaaagcgggaaccttagtcgtgacaatataaaaaggacaaccttcttgaatactctgaacatccagccgctcttccaataagcgcctaagtggttctgaagaaatgccgcgttgccgtaaagaggttcgaacaaacgtccgcagctgatccacctgcgccgaaaaatccagctcttccacttccttgaaggtaatgtctaataccttatcggtctcgatttcctcccatagtgctaaggcttggttataatctccttgggcaatcagtgccccatttaatcctccgactgaggttcctgtaatcacttcaaattgaatgttcttttccaataatgctttccaaacgccaatttgataagcgccgcgtgccccgccgccacctaatacaagtccagtatgataaaccatttctttttgccaaacaccgttattcggttgataaccttgggcaatcagccactgttgaagaatcaggtttgcttcaatctttatctgcaatttctgtttgaacttttggcgtgcggcattttccagcatcacaaaagctgtctgccagttcagttctgttgaaatcaatagatttttgatccgccaactatcactctcatccattttatctaccagcagccaatgtgacttgcattgtatccaatagccttcaccgcgttttacagctgctaaaaaagccgaccgaccttgactatgagaggcataaaatggaaagagcagctgcatttgttggaatctcccccaaaatgctaagacatccgacatgtaaattcgctttagctccatcgcgtcctcccttctgtttatcgttaattaacggcatatatttctttcagtatagcagaaattttctagtaacaaaaaacctcaaggcgagccttgaagctttctgataaaggtttattccacaaactaactattcaaggtgtttaataggtgcgctgttccatttcgaacgccttacgcatcgtattagtagcattgtcaactggcgtcatagctactagatctccttgaacgatgatgcgagtaactccttcaatttcaccacaggttatcaaggtaacctgctgtttatctggctgcacatccagatattttacttctgtcggctgtactcgaacttttaacgtcgtcttataggtatagatattatgcaaatcagtcaaataaatcaaatcgccctctttgacgctttcaagaggtgtaaataacaatcctggacgatctgctcggtgactcgccaaggcataattaccttcgccaagcttttgatctggagacaatgtccctgctccgtaaagcagcacctcattagataagcccttgaaaatcggcaggttaatctccactgatgggatggcaattccgccgatcactggtaagcgtttattacttaattgcgcctgcaataccgcttcagtgcttgccggttctaccgcatcaaaatcaaaggatgcttctttttccatgtttttatcaatttcatttcgatccattttcgctacggcataccgctcaccattatattgcatcaaaaaatatttgatttgattgttaaaaatcaaagccaagcctactaacaataataagaaaagaaaaatatttattagccaatttctttttttcttcatcacatgcctcctgcattcttgcgctaatcatatcataccctattaaatctcgtgatactactttcacttaatagaaaaaatttaaaaaaatgaaataaacagatggtagattcgttatttattaaaatgattttatatgttaaaaaggtgctttaatgttgcagttattaaggggtttgtaatcaaattttaaaataaaagatacgagctttttttttattattgagttaaaatgattgtgacgactattagaaagggtgaaaatttgtgccagaaacgttatttgcttatattgattccacaagtaatgctgtgctctcaaaaggtttttcacccagcgattttgttgatggaatcgttcatcagccgaaacatttgttattgctagatccagtcgcagaagctggagaatacgagccccatacaggtttgaaaatcgttaatagtcctgatcaagtccaacaattttttaacaacaaggtattcacacattcaaaaggaattaagtggattgattttaatgattacgcaatgttgaaggaactaactccattagaaatttctgaactactatattttgggcatatgcgaacacatctgcattcaccctttttttataaattacaaaataatttcgtctattttaatttgggaaacgaaacgatgcgtgtatattatcgctacctggatgaattctatcgtatcttagctagtaagttgactcgaatcgtcttagaaaaagttaacgatcgccgatcttttttccgcaaaggctcttcagttgctcccttagatggcgaactgttgaaggaattatatccgatcctacaagaaggtgcaattttttgcctcagtcaatctgaaatgaaaaatcgcgtttacagcatcccaatattcttatccgatgaaaaaggttggcgccgcagtcctaaaaactacaaaaaggaacaacagatcgcggaaatcacttacgacactgccaaacagctttggacactagacattgagaatgatgatccagtcttttcattccgataaaaaagcatttgcctacacaggacaaatgcttttttttgctatctattaatgactttgtttttgaattaaatggcggtccttcggcaaatacaattgcggtgccttttctgcgaccacaactgcgacaatagccgtcacaacggcggttgctaaaccgctaactccattcataacaagagaaaagatccatggattcattccccataaagcataacttccccaaaacaccacgccagcgataaaatgccagaaaaatcgtgctcctgttccgataaaggttccgaaaacaatattccttcgcacgctccccatatcccgctcactcaaagctttttgaacctttttcgcatataatccagcaaaaccggcaaaggtaaacgcgattggatactcgattaatacttgaacaacgctgagataaacaacctgactcgctggaaaatgcaagattccccaaatgaaagctgccatcagcgcgggcttcaacccacggcgcagagcaaacaatgtcagtgggatcattcccagtgaaatcgtgaagctgctgccgatagtggtcggtataaaagataataccaacgctaaggctgccaccactgttccttccactaaaattcttgtcttatacataaaaaactcctccttttgaacatacagtccacaaaggagaagtaaatatctttacttcatcacaattcctacgctcgaataaccgaaacaggtactagggtttagagtaatctcaatctcagcccgagggctcccctttgcgacagtattattctattttctagtacatccagagtataacagatgtctgtttgctcgtaaatgtataaaatacttttatcgggaaatactttcttgatccccacttggtgataaggtcgtcacctttttgatccgatcaatcgtcaacatcaccaattgattatcttgagtacggataacgatagaatcattagtcaccgctttaggcagccaaccagagattgtttgaaatttttcttcgttgttttcatcctgaacttgaatgactactaaactattctgtagagatgccattttcagtttgagaaaaatattctcattggcctgctcttgagcacgtttttcagcagaatcattcaaaaaatccgagatgaaacgatacgacgaatttgaaaacagcttgattaaattcttcttgggcttctcgtttttagtcattcagcttcctcctatcaagagcatggttacgtagtttgattttacttaaattcaaacgaaaaaacaaggaatctaatccatttcaaaaaaagttaaccattcgtttaaacctttctgaattaaatcataggtttcttcaaaattccctgtataccacggatcgggaattccttcgcctgtgcagcccggaacacgatctaaataaagataaatcttgtcttcagttcctgctggcgccatcgcttgcaggtcactgacattttcttgatccatcccaataatgtaatcagtatcataaaaatcttccttcgtcacttgacgcgcacgcattcctttggccgaaatgtggtgctgcgctagtattttttgtgttccaggatgaggtggatttcccacttcccagcgactcgtagctgccgaatcaacgtcaaaatcagtcacatgttttgttttaaaggcatcgcgaaaaattgcttctgccataggtgagcggcaaatatttcccatacaaacgaatagaatctttttcatgtcatacctcctgtgctatagtcaatttatcgaaatgaaatgagggattgtaaatgagtaaaatttatctttccgccaaactgccagagcttggcacaaacttattaaaaaaagccggacttgattatcaagtctatgaaggcgtcggattaatttcaaaaaaggaacttatcaaaaatatttctgactgtgaagtattgatttgtcccctatcaacacaggtggatcgcgaagtcattgatgctgcacctgaattgaaattgattgccaattttggggccggctttaacaatatcgacagtgcctatgcgaaggagaaaaaaatctatgtaacaaatacacccgtggtctccaccaacgcaaccgcagaattaacagctggtttgattatcagcttatctcgtcgaatcgtcgaaggagatcgcttgatgcacgatcaaggcttcgatggctgggcaccgctctttttcttaggccatgaattaaagaataaaacattaggaatcatcggcatgggacaaatcggacaagccttagcccgtatgatgaacgcatttgggatgaaaatcctctatactcagcgccgaccattgactcctgagctggagaaaaaattgcaggcaacctatgcttctcaagccgaggtaattcagcaggctgatgttttgactctgcatgcaccgttaacagaagagacccatcatctgctgacaaatgaagcatttgagcaaatgaaagacactgccttcctgatcaatgcagcacgcggtccattaattgatgaagcagccttgcttcaagccttgaaaaatcatcaaattgccggggcagctttggatgtctacgagttcgagccacaggtcactaaaggtttggaaaaattgtccaatgtcatcttgacgcctcacattggcaacgccagcgtagaagctcgggatcagatggctgagatcgtggcaaacaatgccatcgctatcgaaaaacacgaatcaatcaaacacatcgtcaatggactggactgagcttaacgctcattccagtctttttcatacaagcgataggcaaaaaattcgatatcctttgcaaagcgaaacaactgtgccgcaatagtaatcggcggctgattcgcccctgctaacaaccaatcagtcaaaataccgccacagccgtgggctaaaaagcgagcataaaattctttgtctgtcggggaaagctccccttcccgatcaacctcatcgaacagacgaacaaatagacgctgcgccagctcattgaactcttttgttaatacttctggctttgcctttacggtattcaaataaaattgatgacaaagctgcatcttttttaacattttaagaacggattcttcccaattcgtcaatgctagctcctcagaaattaaatattgcagtcctcgttgataatacgcgtaatggagcagatcgtccttgtctttaaaatgataataaaatgtttggcggttcagattagccttttgactgatatcttgaacagtgattttatcataatttttttcttggcatgcagtaactagggcttggacaaatgcttccttggttgcttttccttccgccattttttcaccttctatgtttgataaggataattgaaatgttcatacgctaacggtgtcgccatgcgcccccgttgtgtccgtttgataaaccccttctggatcaaatagggttcatacatatcttctacagtctcacgttcttcaccgatgttgactgctaatgtgcttaagccgatcggtcccccatgataaagctcgatcatcgtcttcagtaatttctgatcgacataatctaaccctgcttcatccacctgtagtaatcctaacgcctgatctgcaacagtgcgattaattacgccatctgattgaacctgggcaaaatcacgaatccgtttcagcaaacgattggcgatccgcggggttccccgtgagcgacgagcgatctcaatcgctccttcttccacaatctccgtttgaaaaatatcggctgaccgcagaacgatttctcgcaaatcatcctcttcgtaatactccatatgagaaataatcccaaatcgatctcgtagtggcgccgacaacatccctgcacgtgtcgtcgcgccaactaaagtaaaaggcggcaaaggaaaatgtacgggatgagcggttggaccttgccccaccatgatatccacataataatcctccatcgctgaatacagtgtttcttcggcaacccgcggcaaacggtgaatctcatcgataaataagacatccccaggctccaactcattcaaaatcgcaactaaatcacccggtcgttcgatcgctggtccgctggtagagcgaatctgcacatccatctcattggcgatcaccatcgccatcgttgttttccctaaaccgggaggtccataaagcaagacatgatctaaggcttcctgacggtttttagccgcttcgatgtagattgatagctcttgtttgaccttatcttgtccgatatattgtgcgagataacgaggacgcaacgatttttctaaacttttatcactctcatccgcatcaggcgagagtaaacgttcttcatccatcacttttcctccaattttctttattacatactacaagcatcatactttatttaagagctaactcagtaataaagttgatttttgcataccattccactaatcgtgcaaaagccacgagacggaagtggtactacttcttcatcattaacttcaatgctgcccgtaaataatcgtcggtattttgtagactttctttttccagtactttttcaaccttcttgatttccttcggactgtagcctaacgcctgcaaagcttccatcgcttcagcaagtgctgtatcgtcgttgccttcataaaatagcgacattggatcttcaactaattcggttaatttacctttgagatccaagaccatttgctgtgcggtcttcttgccgacacctgggaatttcgttaaataggtcacatcaccggcttcgatcgcttgaatcaatccctgatggtcctcatttgccataatcgccaatccgctttttggtccaattcccgaaacggacaacaaacgtaaaaacagctctttttcggccaacgtttcaaaaccgtataataaatgagcatcctcgcgaatgatctgctgcacatagatcgtgacggactgctccattttgctgctgtagcggtaaggattgcctatcgcgatttgatagccgatcccattcacatccaacaccacatagctgggactgatgaaggtcaaacgacccgtaatatactcgtacataattgttcctttctttggttaagaaaactgcttttcgacaaaaaactgccgctcgtttccattattttttcgtatcggcaggctaccgataaactgcacatatgttctcattattctagcacaaaaatcagcggttaaaaactcttaccgccgaatccttgtaataaccttaatagagcaaaataatctgccatatgcaattcctgtgtgatcgttaaagttggcacctcatcatcctcataaatcaggctggtcgttaggcaaacatcactgtcagtcaatgtttttgcaaatacaacttggaaatcatttgctaaaaactggtgtaaatcttccttcaaaagcgtttcttcaaattccggcagatcagtctggagaaaaatcctcaacacaggctgcatcgttaattccggtaaacgtcgcaagaccgatagataacgtccgaataaaatggattcactgccaccctgatccgctaaaagctcagaaacaaacgctgcaagctttggctgttgacgtgtaaccatcgtccaaaaagcttttccattgatattaaagcgaatcataggaaataaatgatggtacaaatgcccgctgatcaaataattctccgcatgtaacgcttgaaattttttccaagtcgcgtggtcattgattttcttttccaagagctgatccatcgctgctacttcctcaaacaccaaaaatggcggtctagccaataagctatggattttctctgcgatagtgggtacacgatagtactcctctcgtgttaataaatgtaaaaaaagatttcctagtgaggcttgctttcgaaagtaaataggcataatgggtcttagttggcgagcaaaatcattaaagagcgggtcatcatttaagacgctttgagtgctcgaagtcttttctaatgcgtgctgctgaacctctcgcagcaagtgagccgctaccaaatattccaaacgctgtgctttaataggattcaactcgactcgaaaaaattgctggatctctcgactgatttttctgattggttcatgctgcagtaatgtgaagggccaatttttaccacgaaacaagcgccaataataaaccgatagatacattcgtacaaccgattccggtgcttggaaaagtacctctcctcgttgaatggttaattgcaacggcaacaattctttacttagttcctttaatttacgtcggatcgtagactcgctgcggtataatttatcacttagctccttgattgttcgaatattttcgataattaacagattaagcaggcgataggctaacgaatgacgaattaaatcgaccaaaaattgattttcttccatcgtctgagcagcaatcaacagacgataactgtttccctttttttcaaatagtggcaattctgtttcggtgaatcggtgatactgtttactcagttccgtcagcagacgctgcacactgcgaacatccaatttaagcatctcagctaattcacttttcttatacagctgatcatcatccatcacttccaataatcggacgctaagatatacatccttttcgtaatgttgtaattccagcgctttgatatacataaaaaaactccttcacgctacattttagcaaaagagcgcaaggagctggtactaaagaccttcgaatagacgaaataaaatcggcagcagcgccaccgttactaacccattgacacaaatacataaaccagcaagaatgccctctagttcaccaatctcgatcgctcgaccggtaccaatcgcgtgagaggtactgcctaaagcgatgccttttgccacgggactttgaatattgaaaagttgaaaaacctttgttccaactaaagccccgaaaatccccgtcgaaacaacgattgctaaggtcactggcgaaatgccgcccatctggctagacagatcaactgagatcgctgtggtcactgattttggcaataacgaaacgacaatcccttgtttcaatgaaaataagcgaccgattccaacacttaataaacagttaagtaccacacccaccagtgttcctaaaatcaccggcaaaaaatatttcttaagcttatcgaaattttggtaaaggggcaaagctaacgccactgtcgccggtgtaatcatcatggtaaataaattgccgcctatgttgtactcctgatagctgattccgctgaatttcaacaaaataatgataatgaccacacttgcgatcaaaggattgatgaaagggatgttcaccttactcaacaatttttccatcgctagatagataagcaaagtaagtgctaatccaaaaagcgggttactcgccagcgctgaaatcatccgcttcacctcgcagtttcccaactttttcaaccagtcgcgccttttcttccttgctcttcatgctgattctttcaacaaattccgctgttttcccgacagctacaagtgagacaagagagcacaaaacaactgcgcctaacaggatcggccacgtgtatttaatggctccgtaatattgcatcaaaccgacaccagctggtacaaataaaatcgtcaaatggtttaacagaaagtttgctgtatcctcaattgccgatggctttaataatttggtttggaaggaaagaaagaggagcataataccgatgatacttcccggaactggtaaatgaagaaacatccgcagaccttcgccaataatagaatagagaaataacagacttaattctttaaatagtttcacaaatatcgccttttctaaaaacaggatagttccagtatagcgaaaaaagatagctattttctccaaattttgttgaaattacatgcattttctgaaaagcggacatcatttgcaactgaatatggaaaaggaaaaaactaaaaaaatcactaaaagaagaaatacaaaaaaatgcgccgatttctcggcacattttatttaacaagttccttatattgaccgtagcctgcttcttccatctcttcgactggaataaagcgcaatgctgcggagttgatgcaataacgcaaaccgccttgatcttgcggaccatcgttaaacacgtgtcctagatgggaatcggcttctttactgcggacctctactcgatgcatgccatgagaaaagtctgccttttcagccactccacgcttttcgatcggacgactaaaagctggccaaccacatccggcgtcgtatttgtcagtagaagaaaataagggctcaccgctgacgacatcaacataaatgcctttttgatagaaatcatcatattttccagaaaatggacgctctgtcgcgttttcctgcgtcactgcatattcgatgggtgaaagtttctttttcaattcttcctgctccatggttcttccccgctttcatgattacttagaacacgctgagcatacacccgatgagaaaaagatacgaagaatatgctcatagtgcgtgcttttactgcgaaaaggtaaagaacaccggatcgtaatccggtgttctcctacattctatctaatagctaaacttcttcaacatctgattcaccgcaccaacgggaaaaccgacgatgctgtaatagtcgccttcgatcttttcaacgaagatgccagcaccattttggataccgtatgcaccagctttgtctttgtagtcatcactatcgagatagcgattaatttctccagtggtcaaaggataaaaggtcacagtagcggaagttagtttttcctccagttggtctccttgacgaattaccacggaggtatagactaaatggttgccgccgctcatactttccagcataccaaatgcttcttctcgactcttaggtttgccgaggatttgttcacccagtacgaccaccgtatcactggcgattactaatgcttctgggtgctcagcggcgaccactgccgctttttgccgcgccatctccatcacataattctttggtgcgtactgatctttgacttcttcatcaatatcggccggttgaacggtgaaatcagccatcagccagtggagtaattcttgtcttcttggtgattgcgaagctaaaataacggtcataaatctgctcctctttagactagtgtgggtcttgaattcgtttgaacatatgctccatatcgctgttgctaaaatgaatcaatactggacgaccatgggggcagttgaaaggattctcgcattgagccaaatccgtcaacaagacccgcgcttgtgcttcgttcaagtgatggttggctttgatcgagcgtttgcagctcatcatgatggcggtcgcttcacggaattttttgacactgacagaaccagtaactaaaagcatatcgatcatttcacgaatgatgctttcctcttgtccggctggataccacgtcggatgcgctcgcacgatgaagctgttagggccaaactcttctaaataaatgccgacttcctgcaatagctccgtttgttcttttagcttgatggcatcgttgttgggataatccaaaacaaatggcaccagcaactcctgcagatcatcagaaacgtcgccgattttttcgcggaaatattcgtatttgatccgctcttgcgccgcgtgctggtcaatgatatataagccgtctttactttgggcaaacaaataggtaccatgcatttgaccgaaatattccagcatcgggaatcgttctttgggatgctcgttctccagctttgttatcgcctgttcaatcactttttcaccagattgggtacttagatcaaattcaggatggtcggtattagccgcttcctcatatacttgctcttctgtcgggacctcttcttcaatcagcggttccggggtttcttccacgatcgccgttttctcttgttcggtttcaagtggaacagccatcgttttttcaacgatttcttcctttagcggtaccggggtttcaactgattctgattgtttcggttcgacgtaaaaaattcccgttttaggatcatagttcaaatcactctttttcttcggctgctcctctaatggcaagtccatttgttccgtgtggattttttcgaccttgcgtttgaagctgggattttcaccgacatcaggaatcaaattgatctggcgcagactttcagcaattccgcggctgattagctccatcaattctttttctttggataaacgaacttcctgtttggttggatgcacatttacatcgactaacagcgggtccatcgtaatctcaagcaccgcaattggatatcgtcccaccatcaattttgactgataaccattaatgatcgctttgttcagtgcatagtttttgatatagcgaccattgatgattaccgataaataattgcgacttgcacgcgtcacttctggtaacgacacgtagccattcaacgtgaaatccaaatctttcgcttcgaccttcagcatttttttcgccgtggctactccatagataccagccagagtttgttttaaatctcctgtaccactggtgctcagcatcttgtgaccgtcatggacgagacgaaaggcgatattaggatggctcaaggccattcgattgacgatatctccaatattcgacagttccgtttgcagcgacttcacatattttaaacgcgcaggcgtattgaaaaacaggttttctacggtgatttttgttcctgtccgtaaggaagctggacgatgttcttcaatttttccgccttttaagaaaaggtacgacccttgtgtttcatcagcagtcgaagtctccaaagtcatctcagacacagaggcgatcgacggcaatgcttccccgcggaaccccaatgtccgaatgcgaaataaatcatcgcggttatggattttacttgtggcatgacgtttaaaggcattctcaacatcgtcttgattgatgccttcgccattgtctacgatctggatctttttcaagcctgcttcttcgatcaaaatatcgatctgtgttgcttttgcatcgattgcgttttcaaccagttctttgacgactgaggcaggacgttcgacgacttctcctgcggcgatctgattggctaagcgttcggataattcttggatctttcccatcgaattcccccttgtttaaatccgtttttgtaactcgtataggaagtttaatgcttccatcgggttcatttcaagtagattggctttcttgatactgtcgactacaccaagttcagcagttgacacctcgctaaataacgaaagctgctcggtttcttcaacaatctccgcatttttttgcacaggcgcatcagattctaaagcggatagaatcgtcgctgcgcgagaaagcagatcggtgggcatcccagcgattttcgcgacatgaatcccgtagcttttatctgcgggtccatccatcagcttgtgcaggaagacgacttcgccgttttgctcgaccgcgccaacgtgaacattttttaattgaggcaggctttcttctaacaccgtcaactcatgatagtgggttgaaaatagcgttttggccttcacatttttatggatatattcaataatcgcttgtgctaacgccatcccatcatacgtcgctgttccccgtcctaattcatcgaataaaatcaagctgtttggtgtcgcgtgacgcagtgcctgattggcctccatcatttccaccataaatgtcgattggccggcgattaagtcatcgctggcaccgatgcgggtaaagatttgatcgaaaatcggcagttcggcactttccgctggaacaaaacagcccatttgcgccataattactgtcaaagcaagctgacgcatgtaggtgcttttaccggacatattcggtccagtaatcagcaggagcatctcatcaggactcatgtgaacactatttggaatatattcctgatgtcccagaaccttttccacgaccggatggcgaccttctttgatttgcaggttatgtgtcccaacctccatcgtcggctgtacatactgataacgttcactgacagtcgcaaagctttgcaagacatctgtcgcactcaagctttttgcaagtttctgcaagcgggtaatggcctttttaacttcattgcgaacttctaggaagaggttatattctagcgcaacagatttttcttcggcttccaaaatcaaggtctctaatttcttcaattctggcgtaataaagcgttccgcattggttaaagtctgtttccgttcatatttgccctcttctaagttagcaagattggatttcgtaatttcaatgtaataaccaaatacgcgattgtagccgacttttagtgttttaattccagtagcttcacgttcacgtgcttctaattctgccaaccacgttttcccgttggtcatagcctcacggtactgatccaactgctcgttgtagccatccttaatgacattgccttcagtaatttgcagcggcgcttcgtccttgatcgctttttcaatcaaatccactaaatcatccattggttccatatccaccaataaatcattccactcgccttggttgatgccagtcaataactgacggatctggggtacctgcatcaaagaagttttcaattggatcagatcacggccattgacattgccaaaggccactcgaccagctaaacgttccagatcgtaaacctttgtgagggattcattcagatccatccgttcaaaataagcattcaataaggaagaaaccatcgcttgacgtgcgttgatctgacgcttttggatcaatggacgatcaatccattgcttcaataatcgaccgcccatcgcggtttttgtttcatccaacagccacaaaagagtgccctgctttttgcctgttcgaatcgaacgagtcaattccaagttggtttttgagaaatagtccagcttcaagaaatgctccggctggtattcttctgctttttggatatggcctaagctgcgtttttgtgtgacagataaatacgtcagtagtttgccagtcgcttctttttctaattcatctgtgatatcggcggtcagaaagctgaattccgcattgtcctcgatcgtttcctgccttgaaaagaccaagccaagtcgttccgcaagatttttctgcaaaccttcagggatttcactgcctaaaacaatttcttttgtttgtaaagccgtcgcttcattcattacggcttcttcatcatgcagtagcgctgtttttaattcaccggttgaaagatcaacgtaagcaaaaccgaacttgtctttgacttgggtaacagcagtcagaaaattattggctttggcttcgatacctttgccttccatcagtgttcctggtgtgatcaattggacaacttcccgtttgaccatgccctttacctgcttcgggtcttccatttgttcacaaatagcaaccttgtagccctgttcgactaaggtgtcgatatagccctgagcagaatgatgcggtacgccgcacatggggatcgggtcgtctgcattccgatttctactggtcaaggtcagctctaacaactgcgaaaccttgatcgcgtcttcgttgaagagttcataaaaatcccctaatcggtaaaataaaaaggcgtctttatattggtccttgatcgccaaatattgttccatcattggtgtgttcttcgttttttgaggcattattgcgctccctcccctgtaacttcatctgcttctaaggctgcattgacttctttttggatcattgtggtcagatgctgaagcagatcattggcttcataaagttgttcacgataggcgattactaacggatgctgatcaaactccttagtcagacgatccgcttctttcattgcttcccgttcggcttctggtttgccataatgagcaaactgaaccgcgtctttttgtgcagctttgatgccttcttccaattgctgaagcgtgtcgttttccgctactcgcttttgaagctgctggaaacgagtgatcacttcattttcacctaataatgctgttaaatgagataaagccgcttcgacggcggcttcatttgttaaattcattttatccctctgcttctattctctaaatggacgatcttcattgattaagatcgtttcgattttttgtccatgaccatttttgtcaatatcaatcacacaagcggacaatacggtgcgcccttcttcaatcacttcaaaccgttgcggcaatgccgttaaaaacttttcaatgatcggttcctttttcatgcctaaaatgccatcatatggaccggtcatcccgacgtcggtcagatatgccgtcccttttggtaaaatacggccatcattggtttggacatgggtatgggttccaactacagctgaaacgcgtccgtccgcaaaccaacccatcgcttgcttttcgctggtggtttcgccatgaaaatctacaaagatatacggtgtacgtttttgcgcctccgtaatcagctgatcagcaatgcggaaaggatcatccaaatcggtcataaatgaacgcgcctgcaagttgatgatcgccagctccaactcattcaccttcacatataaatggcctttacctggtacgccttctggaaaatttgctggtcggatcatttttttcgcgtcagcgataaagtcaaaaatcgctttattatcccacgtatggttccccatggtaactacatcgaccccatcttgcaaaaatttcttatagattttttctgtaatgccacggcctgccgccgcattttcaccgttaacgatcgtcaactgtggatggtattttttctttaaacgcggtaaatagtcactcaacatctgccgacctaatgaaccaacaacatccccaatgaatagtaagcgcactttttttccccttctctagttaagcatcttgtcttattatagttgtttttgcttgaaaataaaagattccattcgacttgctgtaagcaatttaaaaataaaaaaactacgagcagcaacgcactcgcagtttttcattattaaacaacctcaaccgtatcgtctttatcccaatgtgccttctgctcgctttttgcacgatagctttgaacatgctcccaattcttagggtcctgttggtaggtactgaaatccaaatcatcgactagccattttttctgttcctcatcataaacaaggctcgcgattgcgttttgtgcatccgtcgtcaatgcctcatcaatcccaacttcctcgactaattgcatcgaacgcttgagatcgatatagacatcgaattgagcttttgtttgtcctgtattcaccgaaattgaatcgcaattgagcttgattgactgaaattgctggtcaaagcttttcaagtaaggctttagttctgcaaaactcaattgcagcttttccttatgtgatttagaagcgattagctgcgaaacattcaaaccatcgcgaattccttgattgaaggaatcaaaataattgacgactgatgctagtagatgcttttggaacccttgattgttctcatacaggctattctctttcactgtcagccgctgatcctctgctttgagatcaacctgctcttgaaccttttttgagccaaatttcggatgcgccatttcataggttacgttgtatgttcctggtaaaaaaggaccataagtatatttattccagtcctcaacgaaatctccagaaacctcctgtgcttggatcgtggttcgaagatcggtacctttaggcaattctacaataagaaatcgtgcatttggatagattttagctggctttaaaaaggaagctccctcttcaatcgaaaaatattcatccttttttaaaagcttagtgatctgcttttttttcagcttttttacctgctgttgaaaaagaacttgtgcgtctttgctgatttttttcttatttgagtagctaggcatgtaccgcttgattaacgtctcatcattttcaatcagtgcagtcgctaaacgatccaccgtagcatctacactatttttatatctagaatagctgacaaagctgaataggatcacgatgactaatacgatcgttgccggcattccagtctttttagtcattaagcccgcctctgaaggcctctttcattgatttgaaatgataatttcgactttcatttgcggaattgatctcccacttaccgtcttttttctctaacttcacctgataaccttcaccattcatattttcatcggtgttgattggtgcttcattgatctttccaggcaattcctgcaataaatatttttctgcatctcgacgcacactagtataatcagtgtatttaccttcattctcttctacgaatttgtctatgattgattcggtatcaacatcatccaaaaagaccatttctggacgtacgtagatgactgctgattctgggaagaattctttaaagctgtaagttaccttgcccttttcagcattggtctgttgaagttgagttataaccttttccaactctgctgttgaaggatcatagtttgtaaaatcttccttcaagctattgacgctgtcttctttaaaggttttgctttccgcttctagatcattggctaactcaagtttccctgccgccttcttatcttcttcttccacttcgtcagaattataaaagactttcgttatatattgacttaccagcgcttgtaccgccttggtgtcgtcattgtatttttttgtatcaagcttcagctcgatgctttcatccttctcgtcttcagaatagtacatagcttcataatgtagatcatattttgcatcttttttgacttcaaataccaatggctcagtaaagctcttatcctcagataggctctcattactcataactttaaagttatcattggaatcataaacgtgctctgaagaaaccttcttcccatcttcatcgtacaaagcgaaatcgttagaagaaacatccaatttctcttttgacttatttttgactttaatatccagtgctaggaagcctgtctcatcatcaacctttttcccatcaggtatgatgtagctgcctccttcaatgctcatttcaacttttgatgtttgggctgtattttccttctcattcgctttttttgtgtcgccaccgccggagcaggcagtcaatgttactaatagactactcaataaaatcaacccactaaatcccctaatttttttcatgctttttcctcccatatgtttcatttttgattaataaaaaaacgcgtattacatatatgataaacggaattaacccttttcgtcaacatgattaaagaaattaacaacacatctaataatattaaaaaaacaaataaaattaatagaagaaatgttaaaaaaagagctaataatatttataactatttaatttgtgatttttactttctagcttttcaagcaatgaagtcgttcctcttctgctgcttatttatgcaatgacctgttaaataataaagaaatgaattcctactgtgtgtttttgtgaagcgtttgtcttctaaaaaaagaggctacgacaaaagtaattgtcatagcctctagcagtttaagtttattattaatgcaccaattctaattggcgtagtgctttataaattccatcttgatcattggtgtccgtcacgagattggcggcatccttaacatgattggcagcatttcccattgccacacccgttcccgccaaattcagcatttcaatgtcgttgttgccatcaccaaaggtcacgatattttctggtttgatcccgacttttttcgctaaagctaaaatcgtttgtgccttagaaccaggattaggaatgatatcaacactattctcgtgccagcgaaccaaacgaaattctgggaaagccgcttcaaactcctcatccattgactgatcataaaaggcacagccttggtatacttcatgttgagagaaataatctggttcatactctggcgcctgttgtccaaaagaagacatcgcattgcgaaccttttccttgtcaaaatcagttacccgcccgaaagaatctaatccgaagagcataatgtcgatctctcgttccgtggcaaaatcaatcatacgagtcaacgcttcacgatccagcgtatgcttatacacctgctcatgatctaaaaatcctgcagaaccattgcaaataatgtaattcgtacagcctaactgatgaatcacatcgccagccaacaagcgggaccgtcccgtcgcaatagtcactaaatgtccagcctcacgcaatgccttcaacgccttcatcgtgctttccaaaggttttctttggctgctcaacaaggtaccatcaatgtctagtgcgattaattttctttccaaaatttatctctccatttttatgtatttgctgccctcacgtagggctaacttactgaatgaatgctgctgtataaaatctcttacccaatcaggattcaccttactatagtcacgcaatgcccagccgatcgccttttggatgaaaaattcatctgttgttagatccgctaagatcgcttgcgccaacaattctgtatcggtgctttctttaaacatcaactgtaaattgatcgctacacgccgataccaaaaattctcatgctgatagaaaaaacgatacacctgctccaactctgctggatgcgctaaaacccacgtagaaaacaccttacgccacgcatcaatactgtcccaccaagttttttcacctaataaaggaagcaatgccgccagatccgctagtgaaaaacgcagaatgttcttttgtgccaaatcaatcgcgtaatactgatattctcgttcattcattcgatagttgcgaaaaatctcttgtatcagttcttcgattgataacatggtgctttcttttaaaaagggccgttccaatagtgctcgctgcggctttttgactccgcaaaagggaaaaagatccttcatgtaccgagccattggttccgcaatctcgggttgatacggaaaaatcaatgcgttcatccttaatctccttattcgttttaaagtaagatttttttcaaataaaaaaattaggtcgattcaaatgccgtatatcattcaactaatgcgtttatctactattttacgaactagctcgtaactaagttcgaatttttctaacgtaagattctcgtacgcacaccattcttctaaatacgctgaagcgtaaagaaaaactggcaaagttgtactgacatccttcattgtagagaagtttcagagaatttgcaaaagcttcttacactattctgtttcaatcttttcgctgtcttagaaaaaagcaatcgttttttgccagcacccaacaattaacacatttttttcaaaaaagcaacacttgaacttgactctgcccgctcttttccgttatactgacgtttgtgtaaaataatgcagcagaagaataatagcccgtccccagttcgttgccagtattggttcaattgtgtaaccgcggctgcgaaggtgaagattgaagaacgaactacacggatatgaatttttcaacggattattttactccaaaacaatttattggaggaatttttaatgtcacgttatacaggaccatcatggaaacaatctcgtcgtcttggtatctcattatcaggaacaggtaaagaattagcacgtcgtccatacgctccaggtcaacatggaccaaacagccgtggaaagaaatctgaatacggcttgcaaatgtcagaaaaacaaaaattacgtttcatctacggattaaacgaacgtcaattccgtaacttattcgtacgcgctagcaaaatcaaagaaggtaaacatggtgttaacttcatgatcttactagaacgtcgtctagataacgttgtttaccgtttaggtttggcttcaactcgtcgccaagctcgtcaattagtaaaccacggtcacgtaactgtcgatggcaaacgtgttgacatcgcttcttatgaagttgaagttggccaagttatcggtatccgtgaaaaatctaaaaacatggttacagtaaaagaagcagttgaatcagctgttggtcgtccagcttttgttagcttcgacgatgaaaaattagaaggttcattatctcgtttaccagaacgtgatgaaatcaacccagaaatcgacgaatcattagtcgttgaattctacaacaaattaatgtaagacttcttacagacaacaacacccgcatcctgattgaggatacgggtgttttttgtctgtaaatgccgaaaatcgattcgacttagttgctatccgacatattaatccattatagttttaatacttgaataacctaaacttgttcgtatgaaaaaagattgatcagatttttatttacaagtatttatcgtgattcaaatcgtgtacttaatccagtcttctggttgaaattgattatagattttttagtatcttacttttttgtttgataattaatgaacgcacctattagattggcatcatttgcaaatctacatcgagttatctctgcatgcttcaatcctttcggcaaaggaatggttttaaaaaaaatagcatagttttgaattattgattctataaaataatcatcctgacttattcccccaccaagaacaattttttctggcgaaaagataaactgtaatgaaattaaactatttactacgcaattaatatactcaccataaattttattagcttcagaatttcctgatttcactatttccatcattgattcgcctgttaatttttctaaattcaattgttgtttcactttttcaactaatgacggaacacttaattcatcacctaaaaattgtcttctaccattttccaaattcgaagaaaccataagtgaaaattctcctgcatacaaattagaacctgaatagatttcaccgttgattataatagctccacctacacctgtacctaaaataaaagccagaccatttttcacatttccaagatttccaaattgcatctctgcgagcgctgcgcatcgcgcatcattcgcaacatgaatattcatgggaaaactgttctgaagaagatcatagaaattaattccatctaaataacgcagagaacctccgtgtgtaatatcacccgtcgaactatccatagttccaggaaggctaaaagataatccaacaatcgagaactcttgattcaattctactatttttttgattgaatttagaaaatcgtcaagacaggttctaggggtaactactttcccctgtttgagtatttctacgctttcattcattacaccccatttgatgaatgttccacctacatctagacttagaatattcaattgatatctcccaactttcagttatagtttattcatttaacgtattatgtccgttgctggatattacttttttataaaaataaaagctctcttttttatatcgtttcatgcttctttcattaaaattatctcgatcaacataaactagcccataccttttatccattccatcattaacactaagtaaatctatgaaagaccatggacaaaatccaatcaaattgacaccatcccgtatagataaccctaattgatgaatatgatcatttaaataagcaattctcttattatcataaatttttccatcgactaactcatcagtatcagaccaaccacactctgtaatcaagactggaatatctggatatctgtcgtgtagttgctgtaacgcataacgaatgccaacagggtcaaatgaccaaccccagttagtatactcaagccatttagatttacatacttcaacattttccatcagcgcttttttaggatcaaaaacatctttttgtctgaaagtcgtcgtacaataccaattaacggcaagatagttagcagttccctcagataaaattttcatttcttcttttgatataggaagagagattccagcattttccaacatattcaaatattgttgaggaatttttccccttagtgagatatccattagcgagaaagaaaacatgtcttcaatcgttttcgctaataaaacattttctgaggtaccattttcaggcaaggctgtaatataagaaacagcaggaccaacttttaatttgggatacttatgttccactaaactaaagacttttgcttgagcgatacacatgttaatattcgcatactgggcctttttatataactctgaagaatcagtgtcttcaattcccataatatctggttgatttaccattacattctgttcgttgatagttaaccaataggtaactttactaccgtattccttcaatagaaaggttgcgtaatcaaaaaagctattaattgactgcttagattcccaaccaccaaacttttcaattaaagacataggataatcaaaatgaaacattgttacgattggctctattccatttgcgtttaacaaatcaattaatcggtgataaaattctactcctttaggattgatttcttttgtatctccatttggaaaaatccttgtccagctaattgaaaatcgataagctttgagaccaagctctaccatcaattgaacatcttcttcaagatgatggtaatgatctactgtaactgtcgtatccatctgtatatgatttttctttttagtcctcaaatcagcaaccgaaatgccttttccctctgcatacgctgccccctcaacctgaaatgctgaagtactggctccccaaagaaaatcgtttggaaaaaattgattattcacttattaatctctcctcatttgccacttcttctttatctaagtatttaaagaatggataataaagtgctactagaacgatcatgattacaattctgacaacaactccttgccaccccattgtaaagaatgctgcaataaatttagggactgtccaaggtaaaataactgcagaaaaatttgggttataagaagtaataaatccaatttgtacagcaataaagccaataccaccggatacaatcgtgcttaaaacaaatggtacaaacatgataggattcaacatgataggaaaaccaaatattactggttcattgatattaaaaatgttcgggatagtcccgagttttgcaaaggaacgatatctcttggatttcccaaaaaatagaatacatatcatcaggctaagagtgctaccagttccatcattattcataaaatcaaaaactactaaattgttgaaatacttaacagattcgcccgcattaaattgttctatagacatcatcatcatggtcataacgactggagtgattacagacataatcgcatttggatgaatcccgaagaaaaacaatatgtttgctagaacataaattaaaaataatgaaggcacagacgcgcctatatctaaaagcggtttggcgacactttcattgataaaagaaaaaattgttccgaaacttgtgaaactaaatcctagtcttactataaaaacaaaaaataataatatgattccaatgaagattggttcaaacgacatagttaccattggtggtactgtatcaggcatttttaagactagttttttattttttacaagttttgagtaagtccacggaataaaaataccaataagcatagaaacaaatatccctgaacttccgagattactagacaaaaaacctccaacactttcatctccaaccgttatttgttgaggagataaaataagaaaagcggctagagaaaataaaactgctgtaatttcttttatttcaagcaattttgaatagctataagcaatagcaactgtagtgaaaagtgctaatacacccattgttcctccagagattgcatttaattgctctgttaaaccgattttctgaaaatactcagcaactctaggtataggaaaactacctaataaagaaaagatagccgctcccaaagttaaaggcaatgtcaacatcataccgccagatagcgcttgcaatattttgacttgtccaagttttgacattgctggaactattttttccgatatttttttattcataaaaaaaccttcctttcataagataaaactatattaacaataccctaacttcttttgtttccaacttaataaagaaatttacaatctgtatgactattttcatgagtatgaaaatttgatatactttgtagactaacatactcatacagtacgtcgaggtgaaaaaatggaaagctatatcaaaatgctagattatttgaacacacacgagttagacagctcttatgcccgtatcattatctatctaattaaacatattaataacgttccaaaactttctattactgagttagcgaacgaatgttttgtatctaatgcaaccgtttctagatttgctcgtttttttcaatatgagaattttcaatctttaaaaaaagaactaactttgccatctcaatataaacctgaattcaatttcaggatgaatagtaaatcagtagatttgattactgacaatccaaaagaatttttaaaaaaatactcacaggctattatcaattctatcgaggatgtatcagaaaatatcgatattgaaaaggtagataaaatactcaccttaataaataagcaaaagaagctttttttattcggctcacctagttcacttaatctgttgcaagagatacaacgcggtttttttatctcaggatctgttatatatactggtgagacaattgccgatttcgaaagattgactaattatattgatagtcaatcttttgtaatcgtattatcctcattcggaaattttctttcagaaaatacgaaattgatgaatgccatcataaatatggattgcgagacctgtttcattacacaacatacagaaaatctaatttctacttcatttgaccacattatctccgttacaaaaagaaattatatcgaagctggaagttatccaactattttattttgtgaatactttgtaagaagatacttttcattatttagaaaaaaataattttggtccttttatttttacattctattttcttccaaaacaactgtaggcacacatatcaaaaatgattcactttcctatatgccccacgattgagttttttgacttagttacatttgaatagtatatgatttttcatatataggtaatgctatttccacagacttttagctacataaagaataacaattctacaacaaattaatgtaagacttcttacagacaacaacacccgcatcctgattgaggatgcgggtgttttttgtcttctatttcaaattctgactatgaattctttttaaaaattactaaaacgcagatttacccttttcgtctagaaccgtccgttactcggccattcctttgataatcgtcacgaaggaaatatcatacatttgtgcataaggtttaacgtagacttcaaaatcgatgccattgctgctaggtttaaccttaaccacagtgccgataacaagatccgctggcgaatttccacccaaaccggaagttcgaacaacgtccccttctttaatctctttttctttagtaacctgcgaggcgatcaattgctgttttttttcttcatatttatttaagatcccaaaagactccccattatttgtacctatttttattggaaaatggttactgttttgattatcagaggtcaataattcaattttggatgactgttctctaacctccgtcacccgaccaatcacccctttttgagacataaccgccatgttttccgtcacgccgtcatcacttcctctatcaacgataagctcatcctgccaggtgtctggagaacgtgtgatgaccgttgccgagaccttctcataatcagtcaatgttttgcttaactcctcttcaacctttagacgttcgatttcttgtgcttgatttttcacgttctgtttcaaatcatcgtgttgctcgatctcgccttttagatttttattttcttcatacgtatttaccagtctagacaaggaatcaatactcccgaaccatcgtccaggtatcataacgatatccccaacaacagacagtggatcattcatcgcagtatctgcatcgtttttcttccatcgatttactactgtaactagaatgactgccatagccaaaattaccacgacaatcatccacctttttaaacgaaactttttcacttaggcacactctataaactattcgacttttaccaacaaccaaaaacaaatcctttgttgcttcaattttctgttaaccgctttctaatgtcaatgatagattcaataatctaaaactggaattcaactgtttatgctgtatctcgaaaaaagtaatttcgttttttggtaactatctattttatttgaagacaaaaaagatcgaaatgcgctgagctttgttttcctgttggatatttttgtaattgtacaaaagtcattcaaaaaccgttaccctaaatagctatagtataattagcagtaatctaacttataacggaggaaatgaaatgaaaaaatcagaaactattgaaacactcgcgacaatcgaagagatcgttaccgttgtacctgaaaagtagtactgggaaatgtaaaatttgccattgtttcttacgttgttgatggattcaagtatgtttcaaagaaaagtataactgttcctttaggttatcaagttggtgatacgataaaaatcagatatgacaaaaatgaacccacaagatttaaacgcctttcaccacgatttgcatagcgctaaattgataccgagtatggctttaattatccgacaacatctctttatgtccctaacatatcatcctgtaagacccacagttacttcttatttcttatagtattctgctttaaattatttaatttcgtgtccttatcaaaaaaattgattacatgcaaaacaccttgagctaatcaaaaacgctatttttaaaggttatgttgacgagagcctccttatcaatgataattgttagctgacatcgaatgaaaaggaaaagagtgaaaaaatgaaatactgtcctaattgcggtactgaggtacgctcagaagcaaatttttgtccagcctgcggatataacttagaacaaacaagaccagcagttggtcctcaaaaagatcccgaaaacaacgtgcccttttatcaaccaaaaatcgaagagccgctaaagcttgagctggaaaaagcagatggcttacacattactcgtgctgaaatcaaaaaacaggcacaggaaaaactgtccggcagatatggtgaatggtgtaaaacaatcattttgctggtcggtgcgaattttatcgccggctttatttttcaaattgcctactttcgtttttttaccaacggcgtgctaagaatacttagcccctatgactactacgacagctatggttacggctataattataactacatccaaccgtatacatcgcggctttcgctagttgcttggtttctaatcatggtggcggcctttattctgatctttttgatcgccgctttatcgaccgctgtcttgcaatggtgcgcgatccacaccttaagaggcaaccgagcagatggattacaaatcttcgcgtactttatcaaggcgcaaaaaaatcgtgtattgaaggcaaatattttaatcgccatctataccttcctttggtcgatgctgttcgtcatcccaggtattgtaaagagtgcatcctatgctatgacgaactatttattggaaaaagaggacaacttaagtgctgcggatgcgattttattaagccgtcaaatcatgcatggctataagctggaatttttgatcctgcgcttttcctttttcttctggaatctcacagcaatcttccagcttacgaatttttacgtgatgccttaccagaatgtgacagagattcaatttttagaccgactttatgaacattacatcgaacaaaacaaagaagtcgaagcatagaaaaaacgtcagctaaatgttttagctgacgtttttttatttattcgttctcgcctgtctgctttgatacatctgcttaaagacatagatcgcgataaataatgcaaacatgcttaacagaccaaacagaatagtcttcgtgctgccggtcaaattgctgccgacatatgagtaaaccaccgttgccggaagctgcccgatccctgttgcgattaggaagggaatcggcttaatcgccgttaatcccgccgcatagctgataaagtcaaaagagataaatggcagcagacgacagatcaaaatcgtgtgtttcccataacgatcaaaatacgcgtctaacttctccagcgaaaagttcttgttcaaccgttcaacaatatctcgtcctgcaattcgtgcgatataaaaacaaaccaatgctcccgccatcgcactcgtccatgaaagcaacgctccttgccaccagccaaaaaccgcagcattcgcaaacgtaatcaaaaaggccggcaatggcgcgatgattgattggaacatcatcagcagaaatgagatcacgactgcccaaactccaaaagaccgtaaatagcccacgatactctctacactcatggaacgaaagagcatcaacacttgtgtaaccttcgaacgaatcctcggaataaagtaaaagccgacgaccgccagcactatcacaagaatcaataggattcgagcgaaagttcgcttgttcattttagacattatttttctacttcctcaacttttgcccatcgataatatgagccatcataattttttacttgtttgaagccgcacatctccatcactagctccatgtaagctgaacgaattccagccgtacaataagtgacgatctgatcctttttagataaaccagcatcttcaaacaacttcgttaactcttctttactctttagcttgccgtttttctggaacagctccgtgaagcgcagatgaatcgcgtcaggcaaatgaccacctttggcctcgccgtacaagacctcgcctttgtattctttgtcctcacgaacgtcgacaactttgtagtcagcataatcctttttcaattcatccgtcctaatcatatgcttttgatcaatcgaatcaatcgtcacatcaactggatctagctccgtactctcatacgctgttttaagccccgattttttcaaatccgtaaagccaccgtcgaccatcttgacatcctgatagccggccgctaataattcccaagcgatccgtccatcatcgccccagcctttttgcgcaccagcaaacaggaccacttccttgtccttcgcgatccctttttcacctaatcgcttgcctaattctgcgggttcaagcaccaagccccatttctcatcgccggaggccccttcttcgactgaagctaaattttgccaaccaattacagtcgatcctttgatcgtacctttattggcctcttcttcaccccgcgcgtcaattaaaatgaggtcatccagattttttttaacgtactctgcatccacaatatactcaccagtaaaagccgttgtttctttttcggctgatttagaagtgtccgctttctcgtcaccgccgccgcaacctgttaaacctaaagaaactaacgccaatagcccaatcattgtttttttcatctttttctccattcatttgtcgttttgttgctccgacattcctgccgaagcccaggaatctccatccttttgtctgataaagttattttgctaaatagttcgaccataaatccgctataaatttagacgtagtccttaaactaactaaactgcaaaaagcaaaactgacagctagctctatttaatggattcatttttctaaaaggcagaaaaatgatttcgcttttcgcttcgcgtatcattttgctaaacagttcgaccataaatctgttataaatttaggcgtagtccttaaactaactaaactgcaaaaagcaaaactgacaaaaggaaacatacccccatatgttcccaaacgacttcttttagtgaatggattacactaatggtaaacgaaggttcgttagggaggagatttttacattcacattcttagagactctaaggcaaagtgttatacctgatcactgatgaaaattcaaaatactccctccccacattctcgatttttgcccttagtaaaagtatataaaacgctttatccttttacaaccaatcattggattgcaggcaaaattatagtttcactcggcgcctttgtggttaacttcccctacctaaaaactgtgcaactctttttctaaaccccatattcgattgttccgctttgatttgttcttcgattttaccaatatcaatcttatcactcattacgtttcccacacctgaccgattggacttattagcaggttgtgattgctccagcgtctttgccttcttcgccaaggtctcaagcacgggctgctttggctcctctttcttcagtgcttctttacccgaaagacttactttggctaattgcccgtcacttaattctttcactggtatctttttaggctccttgtaattttcaattggagtcactttcttttgttttttatcttctttatgtgaagccttcttttcagttttatttttctcaacaggctctttctggtcttcttcacaaggaaaatcagctatccaggcgtcacggtaaatatcgacaaactctgtgaattttcgtacaccgcttgtctcaaaaatcgacaacagcgttagaattttcaccgcccccgcaagctcttcccgcgtctttgtcggatgtccattttttaatgtccaggtatgttttcgtccattggctcctttgaaaacagagcggataacaaattgatgattggccaattcgtcggttctggtcgtgtctttttccttcaaatattctttatataaacgagcttcctcggtaactgagcgatactccttcttatgacgatataagcgcgcgataactgttttccactcattgggagtaaagtagttctcaaaaaacacactaaaacgtcgcaacgtatgattaggcgttgcggttagaaataattctctgattaactctcgacagataaaagaaaaatcatcggaactgatgcaatgacgcacaagaacggccactgcatattccactaccgcagaggcgtcacgcgtctcgttataaaacttgatgattctcttttcaaggttgtttctaagcatattgaacagctgtctacttcctaatcgttgtgtttgcatgatcttccactccctaatatttgtacgtaatttatccagtaccaaaaaatacgcttacatttcaccggttaaacgttatatatcaaaaatatacctaaaccttaaaaaatgctatttctttcgaaaaattttggtattttaaataatgattttttctaataaaaatgaatacattacgtttttttaagcggaaatacagaactgacttgctacgaagtccttaataaataacgaaaaaaagcttctcattctacttactgctagaaatctgccagaaattctctgatcgcttttttactggaatctgcatccggataaacatggttcgattcatggaatccgtcttatttttttcatagacgacttcacacacataatcaccgacgatttgataattttgctgctgaagcgccgctctgaatttactcaatgcaggcagttcttccttaaaggaatgacaataaaaagtagcatatagcccgcctcttagtgttttcagctgtttaaaatgactaggtgtaaaaatgaacagctccttggatacaaaattttctgctaaaaaatctggtcgcggcatgatcgttcctactcgattaaagcggccaatcggcatgtttaattgacctatatgatttttaaactctcttagatagaactcatactccacctctgtcatttcataaatgtttttatcgatcgtgtacgtcaaaatcggtcgcggcggaaaatgttctacctctatttctgtttgcccttgcttttcttgaaaaatcagcgcgcctgcctgaaaggaatcgatgtcttctaattgctgatcaagggcagcacgcagttccagcagctctgctttcttcttttcaaccgtctgactcagttccgccaacccggccgtatcattcatgatatgcttgatctcctccaatgaaaaattgaactgcttcaaaaattggatattatcaacggccgccgactgattgatatgataatagcgataattactttctgcatcaatataggctggatgcagcaaatcaatttgctcatagtagcgcagggtttgaacagaaatattgttgtattgtgcaaaatggccgatcttcatttttgaaaacattttctaaactctcccttgactctatagttactatagagattatactattattgtgaaatacaacacaatatagatgaaggatgccagttccacttttcgcagtttttatcgtgaaaaataaaaaaatgtacaaaaacgttggatttggcgcccaagaaactagtggaatggtatacgacatgaaaatagaattaatttttctttgaaaaattaattcttaaaaatgaataaggaggcatttcaatgggtttacaaaagatcaaggtagttcagtacgggtgcggcaagatggcaaaggtaatcattaattatctgtacaagcatggggctgaaattgttggggcaattgatacaaacccagaggttgtaggaaaagatattggtgaatttgccgagttaggttatacgacgggcgtcaagatttcagacaatgcgcaggaagtttttgacaattgtgatgcagatattgccttagtaacgatctttagttatatgccggaaatgtacgaattttatgagatgtgtttgaagaataaggtcaatgtgattacgacttgtgaagaagccatctatccgtggaatacctcccctgctgaaaccaacaagctggatagattagcaaaagacaatggcgtgacaatcatgggggccggtatgcaagacatttattggatcaatatgcctagcttgatgatggctggaatgaacgatatcaagaaggtcaagggtgcggtgagctataatgtggaagattatggattagctctagccgaagcacatggagccggctatgatctggaacgtttcgataaagaaattgctcaagcagaaagcctgccatcttacatgtggaatgctggtgaagcgatttgttcaaagatgaactggacgattcaaagtatttcccaaaagagtgtgccattcaccttggatgaagatgtttattccgagactcttggagcaacgatcaaagctggggacgcgattggaatgtcggcagtaaccacgatccggactcatcaaggtattgagctggaggtcgagtgtatcggaaaagtttatcgtgaaacagacggcgatatgtgtgattgggaaatcactggcgaaccagatatggtcttctcgttagataaaccagacactgtcgctcacacctgtgcgacgatggtgaatcggattccatctgtgatcaaagctcctgctggttttgtaacagcagaaaaagttgctggaccaaattacatgacgtatccgatgcatatgtatttgtaaaacggacaaaaaaatcgcccgtagactactgtttacgggcaatttttatccattaacgcaataacgacacaatatccttcttcgctgcactcttcgccggcagccagctaaagacaatcccgatcactaccgacaagccaaatgccagcgtcaccgtgaatagatccggccgtaccgacaacggagtgaacgtactgatggcaaaacctaaaagcatcgcgatgagataaccgatcgttccgccgaccaaggtcaacgagataccttccagtaagaattgcatcataatgttgcctttcgtaccacccatcgctcgccgtacaccgatttctttggtacgctcggagacagaaatatagatcatgttcatgacaccgattcctgaaataaagagcgagatgccgccaatcaccgagatcagtaaggtaatactggtcagcagcatgcgcagttggtccacttgtccagccaaatcctctgacttatagcttcccagttctttccatgtgccatattttttcaaagtctcttctgcttccttcgagacattttttacattggcagtttgctttattttcacttggatcatactgcgatcttcagtgttaaaataatgctcatagacattttctggcacctctgcaacaacgtaatcctcagaggtggagacaatggaaccgccattgcggtccttcatgattccaacaacttcaaataaatgcccgccgatcttgatactttgaccgattagtgcttctggctcctcttttttgattgcttttgcagcagtctgatcaatcaccacaacgggattttcattataataatcactggcttgaagaggacgaccatacaggacctcgctcccttcatttttcaataatttgaaacaattccaacgaccatcatttcccacatcatcaaaggtttggtctgcgtacttgatgccattgcgagaattgtcataatagctcactgattgcaccccagggatactctcaatcttactgatatcctcttcggtaaacgcatctaacccattctcatagaaatccccatttttcggcgtataggtataaccaacactgccatcaaattgatccaatccaataaattctgacgcataattttcaaaggcgcgaccaatcgaaaagaccgtgatcaccgcagaaactccaataatcaaaccaatcatggtcaaaaaacttcgccgtttattttttccaatggccttgaaagacgttttccatacttcactaaaccgcatgtgcaacaccttcttccaagatctcgccatcttttaccgtaataatccgttgacaatacgctgccgcttctggatcatgggttaccattaggatcgtgactttttcctcttcatttaagcgtttaaataattgcatgatttcttcagaggtatgactgtctagcgcacctgtcggttcatccgccacgataaatttaggattgccaacgatagcccgagcaatcgccactcgctgctgctgacctccagaaagctgcttcggtaatttattgtatttatccgcaatcccgacttttcgcaaagcctccatgaccagcggtttggtttgcttttgcttcattccgccataaagcagcggcaacgccacattttccataaccgtattgttatcgatcagctggaatgcttgaaaaacaaaaccaaccgatttattccgcaaagctgagagcttctcatcattgaagcgatacgcatcttctccttcaaaacgatagcttccttcgaaatcaccatctaaaaagctaatcgtattgattagcgttgattttcctgaaccagatggccccattactgcgacaaattcgtgctcttcgatggtcagactaatattctttaagacatgaatctgctcctgatccgccgtgtataatttgttgatattttccatcacgatcattcaacggtcacatccatcccatccttgacgtcttttgcatctttgactattttatcgttctcattcaggccttcacgtaaaatataatagccattgcctttttcagcagagatggtatgtttttcagcttttcctttagcgactttgtagaccacctgttcaccgtcctttttcaccacgctcttaaggggtaaatggatctcattgcgtgggatcaataattcaacagaatagccaacaggtatcgtttcgtcaggaaccgccgtaaagttataggtcaccaaactgtttgtgtcctctttcgttggttcgttgttcatttctgctaatgaagtgaatttgcctttgaccgttttttcgttattcgcatatttgatctcaatcggttcgttcaaggtaatcttagaacgatcatactcggtgactgttcccttaatggcagattcttcgctctttaagaccatcaaggcttgctgcggatcattttttgcatcttcgtttaaggccgttaccactgaatcgttcgctgctcgaatcacttcaccccaacgataagtcaccaaaatctgatctttcgtcacatgatcgccttcgtttacgtgaatggtttgaatcgggcctttttctgaatcaactagaaccgtttgttttttcgttgattgaacctgcccttttaaatgcagcggtgtttgcttgctaacttggtacagttccactgcagtgtcatcctttgcgtttgcttgggtattttgatagaggaaaaaaccagcccccgctgccactaacactccgataccaataattatttttttcatttttttgctccattccttccattccaaaattcttacacttgttgcttactctttaaattttagaggaaagttctgatcgctacttccaacgaaagtacaaaatctaaataggactttagaccgaagaacatttgtttttttaatggatgaagaattgtcgaatgcattagtaaggactcgttgacaccaaggacttctttcataacaaaaagcatcatcagagttcctcccaacgatgcttgaatttatttattttcccttattgatctctttagcgacccgttcattcattttgcgttttaactcattgattcgcgttttcgcttgaatctcatgaagcatattctctgcaaattcccccacgtcttcgccaactaattccaatactggaacatgattgctggcaccttcttcaaagaaggccaacaattcatacattggcgttagcatatccatgccgtcccctgctgtaaattcccataagaaattttggatttctttgtagactacctgatattcacgaggtaatttttttagtcccgccatctgctccctatattctgctttgtccgtataaactcttttgaagtagctaaatacatttttatcactcattgttctgactctcctttagcttatcgatctgtccagaaataaattcccaacgctgccaaaacaacgccaattcattttctcctgcttcattcaatgaatagaactttcgcatcggaccaagtgaagattttttctttgtaacagtcactaattttttcttttctagtcttaataaaactgtataaaccgttccctcaacaatatcttcaaagccatatttttgtaggttattcgtaatttcatagccataggtttcgtgttgattgataatttctaagatcattccttcaagcacgccctttagcatctctgtaatcccgttcactgttatcatccttcccagctgctgtactaacgtaattttttccgatagacatatatagataatacttggaaaatcacgattgcgccaatactccatacgaatgccacccagatatctgcgggaatttttccgtcggtcaaaattgaacgtaaagaattaatgatcggggtcattggctgataatctgcaaaacctcgcaaaactttaggcaatgtttctgttggcacaaagcctgagctgatgaataatagaccaatcagcaagtaagaaaaggcgattgctgtttcattattcctagcgatcaatccaaagaggacggcaatccaagatagtgcgtaagtcgcaaccagcaaaagcagcagccccacagcccaatcaaatacatctgcctttgggcgaaatccaattaaaatactgctgatcagaacaagtagcgctgagataaaattgaaaatgacactggtcatcacgtgactattcaaaatcgcggacttcgcgatcggcatggaatggaaccgttcaaaaataccattttgaacatccgtgtttaaacgaaaagcggtataaccaacgccgctggcaacagtaaacaataaaattgccggcacgataaagcctttataggtctcttgcgggatcgtcatcgccccaccgaaaatataaatgaatgccagcattagcatgatcggcatcagtaccacggtcatgattgtatccacacttcgggtcatatgcttcatcattcgtccggtcaataccatcgtatctgcgaatacgttcatttttctccctcccctcggttttcgacaatcataaagaagacgtcatccaaagaagattgtttttgggtaaaggttaaaatctcaatcttcgccgcctgcaattgatttaaaatcgtcgtgattcgttcaacttcattatctgttacaacgttcagcgccaataattccttattcatttttcctccgacaagctgttcagcagcttccaatgtttcctcatccgcaaaggtcaattccaaggtttcttttggcaactgctttttcacctctgcgatgcttccctgcaatgcgattttcccacgattcaaaatcgccacggtatccgccaactgctccgcttcctccaaatactgcgtagttagaaagatcgtcaccctcgcttttttcaacgaacggatcatttgccatagagcagcccgcgcctgcggatctaatccagtcgttggttcatccaagaaaagaattctgggcggatcgatcaagctcatcgccaaatccaatttacgccgcatcccgccagagtacgtttgcgtcggtcgatccgccgcttcttgcagatcgaattccgttaacagctcatcaaccttttccgtataatttttcatatgacgaagctttgcgatcaaaactaaattttcccgtcccgttaatacctcatctaccgcagcgaattgtccggtcaaactaaattccttttgaacctttaacgactgctccaacacattcattccatcgatcgtaatatagccattatctggcttcagcaaagtggtcatcattttgactgttgttgttttcccagaaccattcgttcccaataaagcaaaaatgcttcctgtcggcacatgaaaactaattttatctaacaccttgtgatcagaaaaagatttttccaaatcaacaacattaattgcttcctgcattttactcactccttaatcatcattcggtactttgtaatattaagtacagctataatgtataactaagtagctattttgtcaactactttgttctactaagtactaaaaattttcctttacatcttgttaaccatccattatactttcgttaaccaaaataaaatatttagttaacgaaagagtgagtgtatgaaattaagtagtcgagaaattgttttagccggattatttgcagcagtaataagtattttagcccaattcaccattccttttgggcctattccattaactttacaaacctttgctgtagggttcgtggtaactattttaggcaagaaaaccggtactattgccgtagcgatgtatctattgatggggatgatcggtttacctgtgttagctggcggttcagcgggaattgcccattatttcggaccgaccgggggttttttagttggatttatttttcaagcctatgttactggtctgattttagaaaaattaaccttcaattatttttggtcaatcgccgctaatttagtcggggcttttattactctgttcttcggttccctttggctgaaatttagcggaggtttaccatgggatacggctttttctgccggaatgattccttttattctgccaggcgcaatcaaagcagtcgcagctggatatctgggggtcttgcttggtagaaggttgcccttcacaaaattggtgtatcgttaaatctttgaagttggaaacgcctatgttattgatgccgcataatgtgttctcaacaaaagttagaaaagaaacaaaacaatgtttaattgttagaataaaaataggctctaagctcaaattttgagcctagaacctatttttaattttttaattcaagtcctgtctccaaggcaacacgttttccttacgataaatcgcagcttgcccgatcgaattgaacagctccattttttgtttgacaacggctttagctgcatcaatacattctggatagatcgcatttgggtcccataattcagtagtcgaaagaatctcacgacattttttgtagaaagcatatttgtagtcagatgaaatattgaccttttgaatcccgatttgaaccgctttggcaatttcttcatctggattagctgatccgccatgaagcaccaatggaatatcgactctgctcttgatgtcttctagtacatccatcttcaattcaggtttgatgtcttttggataaattccgtgagccgtaccaattgccactgccaatgtatcgatcccggttttttcaataaattcttcggcatcctctggtttcgtgtaaataacttccgacacgccgccttcaaccgatgttcccgtattcccgatcgtacctaattccccttcaacggaaacaccaatcttatgacaaacatcaacgacttccttcgtgatggcgatattttcttcaaacggtagtaatgacccatcgatcatgactgaactgaatccacagtggacagcgcgcatgatgctggctaagttatccccatgatccatgtggataacgaatggcaccgaactattttttgcacgagataccgcatattggaaaaattcatctttggtaaaatctaactcagttggatgaaccgcgatgatcgctggcgcatcattttcttccgctgcttcaatgactacgcgtaagaaattactgtctgcgacgttaaaggctcctacggcgaatttattttcctttgcgacttctagcatttgcttcatattgattaacatttgactttgtctccattctcattttaagatttattttttgaacccgaaagttcgatataccgtttcacaacttcttttccagctgccatcgtttgatgaacaagcgtcggataatccacctcaggattttctgctaattgcttttggacttcggctttttgcgccttcataaaatctgaacccacattgatcttattgatccctaattcgatcgaacgcaggatatttttctcacctgcgcctgatccgccatgtaatactaacggtaaatttgtcgctgctttgattttttcgacaatatcaaaccggaaatccggcacatacccttctggataatctccgtgactggaaccataagacagtgctaaacaatcaacacccgtctcgttaataaaacgaatcgcatcgtcgggatcggtgtacatctcatcattggtaaaatgatcaccagccaccgcccccatatcgccaacttcagcttctacgctggcattgtagacctgcgccagctctaccatggctttagtgatccgaatattttcttctaacgaatacatcgaagcatccatcatgacgctggaaaagccttcatgcagacactgtttcacgaacgcgacatcctgtccatgatctaaattaatcgccacttcgactttggcattatttgccattcgaataatcggttgggtcaaatagcgaatatccaaatgctcttttaaatgatcctgcaataaatcgacaataatcggtgaacgcatttcctctgccgcttcgattaccgctttggctgtttccaaattgaagcaattgatcgccattacggcatagttttcacgattggccttttgcaacatttctttcatcgaaacatacatgtgacaaaactcctttttcatactaaagaattaatttttctctgaaaaattagttcgattttcaagccgtatatcattccactgggttcattacctgtgattctgtgttgcttttgatttaagttttttcaacgaatctaactgcgaaaagtggaactgacacccttactacgaaatcttgatggaagaaaaatctacttcttcctcttcttcatcgtccttgatttcattttccactggctctttcttcagaacgaacaacaaaattccggtaatcgctgaaccaatcaataacgctaacgtaaacttcaatggatcagtcatcgctgggataatgaacactccgcctgacggaaccggcgaaccaacgccccacgacatactcaagccgccgccaattgccgcgccaactgtacaagagaagatcacccgcaatggatcaactgctgcgattggaataacaccttctgtaatcatgcaaagtcccattgggaaagcgattttgatattgtcttcctcttctttggaatatttgcgtttgcgaacaattttagataatacccaagagatcgtgacaccaaacggcggtaccatagaagccaatactttcacggcttctggtccctgcacaccctctagtagcaagccatcggcaaatagtgacgctactttattaaccggaccaccgaaatcaaaggcagccattccgccaacaattgagccaaataagaatttacccgaaccttgtagcccttctaagaattcggtcaacgcttctgttgcccaaacaatcggcaatccgatgacaaagaacatcaataagccaatgatcaatgtagataagagcggtacgatcatcatcggcatcaaaccttgtgcccattttggaaccttcagatttttcactaagaatagtacaaagaaaccaaccaagtaaccaccgagcatcccgcctaagaaaccagcaccgatggcattcgcgatcaaccccataaacaaaccaggtccaatacccggacggtcagcaattgaatacgcgatggcccccgcgataaccggtgccaataatcccatccccaaaacacccaatgagactaacgcatctggaaccgaataggccgccttataatcctcaatcactccgccacctgtcaaatttccaatcgcgatcaacaaccctgccgtaacaacaaccggtaacatgtacgagattgccgtcagggcatgctttttcaattgaagctgcttaaacatttagttcatctccttattcaaattaatgtatttattttcttccagaaaaataagtctgattttcaagccgtataccattccactaggatttttattcttttgcagtggactaattctatgctgtgttttcttcactgattaaactatgaagagtggaactggcatcctttttcatattaaagttaaagaaataatttcctacgcctttacaatttcctcttcgatcttattaatcaaaccctttggtgctttgattaccatgctggtcgggatttccaccaccttttttccttcaaaacggtcttttccgccgatcttgatgtctgcggcgataatcacgacatcggcggctttgatttcttccatggttaactcgtcttctgttccgatggttccttgtgtttcgatgtgaacggtgtgacctaaggctttggcggctttttctaatttctgtttggcaatgtacgtatgggcgatgcctgacgtacacgctgcgactccaacaattttcatcatctattcctccattttcttttttaatcttcttccattgggtcctttgataacaattccatcatttccgctttggtccgagcattgaccatattttcgatgaaatcttcatcggctaagagcatcgcaaccttctgcaataacttgatatgcatagtgttggcatcggtattcttcacggcgaataaaataattacgcgaacaggttcctcatccaaggattcccatgggatcggcatggcggctttaccgacaactaacgaggtcttgatcacgctatccgattttccatgaggaatcgcaatactatttccgattcccgtcatgccttctgcttcgcgttcgaaaacatctgccataaagtcgtcctcgtcagcaatgtccccatttgccattagcaatcgtgtcaattcatgaattgcttcttcttttgttgtcgctttcatttctaattggattaaatcttcggtaatcacatccgcgatactgaaatcgtccatcatttgctctgctgtcatctcatatctctcctaacatctctttcactcgtttttcgtcttgttttgtaaatactgaattcaccaaaatcgtcgggatcatcatgtcgatggttaaattgacagtggttaaaatcagatcaatgttttgatacttttctggtgccttggaaaatttgcgtgccgataagacatcgacaatttctaactcgggaaatgctttgcgaacctttaccttcaatagctctgaagtccctaccccgctgctgcacatgatcagcacacgttttttcgaatggatcatttctttatacttcacaaaatacaaagtcaaaaatccgatctcatcttcagaaatctcatttaattgaaacttttcttcggccgctttgctgacctgttggacttgttgaaaaacctctggatactccagcttgatatctcctaataaatcatttttaacgatgatctcgtttttcaaacgatacaataatgggtcaatgtgctcataaagatcttggcgattcggctgatgatcgaccttcatccccatcaagcgactcatttcggtggcaaaaaaatcagtgatcgccaatgcttcctttgattttcgattcagcttgattggttccttttccattcgcgaagaaatcaggtattggaataaataaaacgtctcactttccggtagaacaatattcagataatgattcagctttgtaatcaccatcttggaaagctgatacagttgatcatattgcgtgatcagtgcttcttcatcaggatctaacagctccgcacaggtatctgcgtgaatttctccttcccgtacacgtttgattaaaatgtaaatatgagaaaagatattgctgttatagggataagcaatcccgttttgcaattttctttcaatgtactctaataacgaagtaataaagttgatgtcataggaactgattttttcctgttgtgtggaaaagtcttcctcccagacacgattcgcgctgatcaaatgattcaccgctttgcgaatgtgcttttctgttccttcgatagagacacgttgtcctttgcgaatcagtgacagctggtacttcagcaaaaattcattcatccgtaccaaatcattcgtaatcacggtattgctgacataatattcgtcgaacaaatcattgatcaacacttttttgggggatttgaataacaaagccaacagaattgtattccttctttctgatggaccttgcacagtatcattgcctcgttttcggacactttcttttaaataattgtcataatctaaacgaaatccttttccgacttccgctgaaatgagctctccgacatcggaggcttcattgatttttttaatcgtacggtaaatggttttcgtggaaacattggcaaattcagctaactcttgagcggtgagtgtcatcccatgtttgataaacagttcgatcaattgtgtttcacgtttgcttagctgcattttgtcaacctccttgtcattaatatagcctttttttattcacgtacattttttcttatgtccattgaaatggacatttccgtaaaacgctttcaataactattttaaattattcgttgaaaataacttgatcctcaaaaaagtaaaaaaatttaatactctaagaaagtgcttcagattgaccaattctctcacctccctccatttttcttgaacggataaaaaaaacagcgaaaaaatcgctgtcgaactagttatccccaacacaagaattttattttcataccctttttgactgaaattatgctttagttttccacctgtgcaaaacttgcttgcttcgctaattgataaattggtaccaattgtttataggtttctaccataaatgcttgagcggcttgcggatttttccaaatcggatcttcccttttgatgattcgaccaatttgaaattcgccttttttcacatcacgaaaccttatcaacagtttttctatgcgttctggcgatagctcttctactttcggctttgtgtgatcaccggatagaacaaaatctggggataagttttcaaaaatttctggatggtctagtaaaatttgcgcaatcgctttttcttccttcggctgatcaatacaggacagccacataaaaacatactccggccaaattcccagctgaaaatgcggctccattttgtatccacgcttttgtcggctcaatgctgaccaagtattttcaggcggataggtcgtcctgcggcgatgctgggcaatgtggataaatagcttttcgtctagcagcggctctaactcctgttgaaaaacttcatctaactgttgaaaagttggttgaacttcctggcgaatcgctgccattcgttcatccaagccgtcgatatcaaaaacttcaaaactcttttcagtgaacatgttactcccccttattcctactatcgtaattctacctatcttatcgctgagtcacaagttatcaactacccatgttgataaaaattcgtagtgattttcccttcgaacaaacatcgtttcaaaattttgataaaactcgctgattcttttgctattttaaagaaaatatttccttctctttgtgaaatcaagtatattataagtagccattttattattggagattcagaaatttatttctgaggagggtaaaacgaatgatttcagacgcaattggcttcgagaaaaaatttcgtttaaaagaagacaaaaaatttgaacaatacaagatcatgcttccgaaactacgagaaaatgatgtgatgataaaaatttccgctatctcgataagtaccttagatacccagattcgacaaacgattaaaggagcgaagaaaccctatattttaggctttggcggtgtcggcattattacccgactaggcagcagcaatcaatacttaaatgttggtgaccgtgttctctatgtaaataaggtcggaaaatacggcagctatagtaactttcaaatcgctgatgtccgttccatcgtcaaactgccagactcttttcctaccgatgaagccgccgctttttcctatagctttttcttggcttttgaagtgttgttcagccaactgcaattgacacctaagccgaaaaaaaatcagggaaacctattgatcctaaacacctctgacgggctaggcgcgaccattatccaattagcgaagtgggctggcttgaaggtcgccgctacgatcgataaaaacaattcagaaatctggatcaaaaacatgggggcggatgtcgtcgtctctcaatccactcagctatcaaaagaattgacaaacgcggaaatgacaccggttgattatgtgatcaatttagatactgaaaaggaaaaaaacttcgatcatctgtcggaattcaaggatacggccaaggtgctgctcttgcacttcattaataagaaaaagaaaaattttgatccagactatctcaacttctattgcgaagatttcttggaggcttcttttactaccgatgaaggcatcgagtattcccgcaagatcatggagcttttggtctatttatgggaaaaaaatcaactaacatccattttgactgcacagctaaacggcttttcagataaaaatttctacggagctcataagctgatcgaaaacaacccaaactttcgtcatctagttttaatcaactgacacaatctcgttcaattgaacgagatttttttatgaaaaacaatttttggagctaaaaagaagctgttctttgcttccataacgtttgttgtcatttcctatagaaatttctcgtttttctgaggttaacatttgctaattacaaagaatgggattaagatataaaatgaaattttcatttacattttcatttcaattattttataggaggtctttatggattattcactgactactcggttagcagctgagttcttgggaactgctttgctagtaatgctaggaaacggtgcagttgccaatgttgatttaagagggacaaaaggttacggaagtgactggatgttgattgcagtaggttatggctgcggggttatgattcctgcaatgatttttggcggtatcagcggcaatcacatcaacccagcgtttacgattggtttagctgttagcggcatgttcccttgggcggaggttcttccttacatcgttgtccaaattcttggtgcgatggtcggacaattagtcgtagtagccagctacaagccttattacgatcaaacagaagacaaactacatgtgttaggtaccttctcaacgatcaatagtgtcggttctaaatttaacggattcgtgaatgaattcttcggatcattcattttattcttcggcgcactaggaattaccaaagcgccattcttccaaaacaatttaggaacagcacacttagcattaggtttcttagtttggacattagtcgcatccttcggcggaccaactggcccaggtttaaacccagctcgtgatttaggtcctcgtatcatgcacgccatcttaccattgaaacacaaaggcgattcacaatggagctactcatgggtaccagtacttgccccaatcattgcttcaatcgtagcaatcgcattatataaagcattgtttatctaaaaacacgaaactgccgcaattttttgcggcagtttttttaatcaacaatctcctaaaaagagctgttgcctactatttacagttccatcacgtattaattcaatcaaaaaagaatagccactctagctcttccttctatttaaaccaatccttcaacaaactcgaccggaaacattgttttttcagccgtttcttctacagtcatgccttgagccaaatagcgtttcgccacactagccatactttctgcgacctccacgataaatttatcatagtcgtaaaaacgcagcacacgctgcccccaaggatactctttactgtgatgcagaaagtcgattccttcaacctttgaaagcttgtcttcccatttgtctaaatcctcaacctcaaaatacagttgaaaattatccgactgctcctttggattcaatggaacacccaacaacccttgataatcagcctgtaatgaaaagccgctctcaaaagcaacatgaacattatccagatccatttctattttttgttccataacctctacatagaactgcttcgccttcgtcatatccttcactgccaataacactccaccaaaattcattcctatcaccatcagagccgctactcgactctccttccttttttactaaatatacccttagaatttggcgatttcactgtaaaaatcggacatcttccgttgataagcttgcggtgtaatgcccgtcatcagtttaaaatcacgattgaagtgagagaaatcgtaataaccggcgggttccaacacttttgtaattaccccttgccttcgatttagtaaacggatcgtttgattaactcggactaaacgagcaaacattttggtgctcattcccagatattcattaaacagtcgcgtaagatggcgttcactataaaatacctcattagacaacttctttaaggagatatttcctgattgttgaacgatcatttttctcgaagtagccaactctggcggacagtcctttaagagagcatgaacaaatagacgatcaactccagccagtagctcttccacactttccgctgcctccaacaattccatcagtacctgattcaatttggcatgaagcaattgaaaagaaaaatgccgatccgctaattcattttgcttaagacttagaaacgcatgaagtccagccggttgaaattccacgatgaatatctgattgaaagtcgcagcttcctcacctacattggcagccgcagtcattggcccaagtagctggttctcgatttgatggtccttaaacccgcatactaatgtcccacaaccatgaggaatgaccgtataattctcagaaatcgcctgtttcgtcggaaaagtcaatgtataattcgaaatataaggcaacaatgccgcatgtggcctcacatacatacagtcttgattccgaaaaataatccgttgattctgcggatacaaaaacaacgccttttgattgatcattccctcacctcattcatagtaacgattcaattttggttaaaattgattgattttcattccggataccattttactaatctactgaagtagaaagtaaaactggcaacttcattcatattaatgactcaattctatcatcatatcaagacttttttagttgctactagatattcataacttccttaaatagttataacgtgttataattctataaaaaagaggggatttgaatgggacaaatcaaagtacggaagattggtaattccgttggaggaatattccctaaagaatggggattacacgagggagatatcttggaggttaaaaaagaaggaaattacttcatattagatgcccaagaagtcgcaaaaaagaaagatcgtgagttaatcgaagagagttttgcagagtttgaaacgaatcatactgtttctgaagaagaaatgactacgctctttagcaaatatggttggggtgagaaatgaaatcttatcagctcatttattccgtctcttttagaaatagcctgatccagcttatatcggaatgggagaacgaactttttctttcagaagaaaaaatcaaacacttcgttcaattaatttatcgctcactagaattattaaaactatttcctaaaatgtatgaagatgtttctccattatatggttttgacattccgacttatcgaatcttgattggtcaaagttatgcaatcttttaccgaatcgatgaagagaatcattcagttctaattggaaaaatctttaaacagaaacaaatgcatctgaaattttaaaagaccaagcacaatgattaactaaaaaactgcgactctcatcgagaatcgcagttttccatttatttagttagaaacgccaacgcattgtcaatcaaatgctgaaccgtttctttcggcataaccgacataatatctgtgatttgaggagcagatttactgtcggtgaagacgacgttcaacggcatatacagtttacgacccttttgtcctgtttctgcttgaacagctgacaagatggcaggataatccactggttctgtcgcatcttttattttttctgacatcgcagtcaaaatttgtttaacgccttcgctatcaaattctgccaagtcggtataagtgaaggtcacttggttggcatttttgataaacaagattttttccataaatgtcattaaagtcttggcttctgtgtgatagatatccacgacttttttaacaaaatcaagatccttttcgatgccgattgcttttaattgttctgctacgtctgtttcagcagcgtcaactaacagcatgattcgtctagttaattcgtcaacggaagtttttttaatgtattccgcattggtccagtcaagtttcttttgatcgaaataagcaggcgaagcagacatccgattgatatcgtaagcttcgatcaattcatcacgagtgaacaattctttttctcccactggtgaccaaccaagaaaggcgataaagttcagcaacgcttcattcaagtaaccatatttacgatattgactaatgaattgcagggtatttttatcacgtttactcaattttttatgagtatccaagctatagatcagtgtgatatgaccaaatagcggttgcgggatacctagtgcttcgtatactgcgatttgttttggtgtattcgcaatatggtcatccccgcgtaaaacatgagtcatcttcatcaaatagtcgtcaatcactacggcaaaattgtacgttgccatgccattacttttttcaataatgaaatctccgccgatattgtctgaattgaattccacccggcctttaatcatatcgtcccagccataaacatggtcttcaggcaaatgaaggcgaacggtcggttttcggccttctgcttcggcttgtttgatttgttcttctgttgcgccataccagcgaccatcataatgaggcgcgattttggcttcgatttgttggtcatgtaattcttttaattcttcttcggtggcatagtctttataggctaaaccagcgtctaataattgttgtacatatttgtgatacaaattcacacgatctttttggtggtaaggggcaaattcaactttcggtttatccggaccttcgtcccagtcgatacctaaccaatgaagattttccatctggctttcttcaccatgcggaacatttcttttcaagtcagtatcctcgattcgcaatacccaagttcccttataatgtttggcaaacagatagttgaataacgccgattgcgcattccctaaatgtaaaaaacctgttggacttggtgcgtaacgaactcgtacgtcgccggtaacttctactttgtcttttttcaatttgattccctccagtttaaaagccctaataaataatgcaattattaggactttaataacagatgctattataggttaagatgcgtgatgaatcaaatgattacgatttagatcgtcaattgcgcgatgtaaatcatcaatgaagtcatcacagatagccatggtcatagctggacgaacgacgattcggctaatagttacatcgtcaagatcttttggaagtggataagcaggcacttgccagccgtattccttcaacttgtcttctaaatcgtatagattccaagttaattcgatattatccgcaattttccaacagttgattggtaattttgatccatcattgatgatatcaaaaatacctagtgcttttaattctgtattgattcgtttagatacttctctgacattgttcatgatagctgtgaatccttcacgaccaaaacgaatcaagttgtagtattgtgccacaatatgtgccccgctatgtgagaagttaatagcgatcgaatctacgctgcttccaaggtaaggtacagcaaaacgcatttctgatggtaaatattcttccgtattttcacgccaaacaatccagccaatcccaggatagaccatcccgtatttatgtcctgaaacattgattgatgctacatttttcaaacggaaatcccatggtttgaacccatcaacaaatggtgcaaagaaaccgccaaaggctgcgtctacgtggattttgattggtaatttagctgttttgttgtattcagaaacaagttcatctaatttttgaatatcatctacttggccagtgtaagtgatcccttggatacctacgaccccaatcgtattttcatctacgtaatccatcacgatgtcagtatttaatgacatatggttttcatccattggaatttcccgcatctcgacattccagtacgtacagaatttttcccatactacttggaatgcagacatgataactaagttaggtttgtgttcatgcaagttgtcgatatctaatccggctgcttttgcgcggtgtttccagctgtgcaacaaagccaatccgcctagcatacaaccttctgaagaacctactgttgaagttccgatgaagtctttatataattctttgccttcaccaatattccacatatgggcaatcatactaattgaataattttccattgctgtggtttttggatattctgatttgtcaatcgcattcgtttcaagtgaaccaagcatcaagcgatccgcttgtggttccatttgagtcgtacagaatgtagccaaattttgatctgctttcgcttcattcaaccgaatatgattgacgagcgtctcggctgtgtcagggttcataccctcatcaggtaatacttgtttaggcatgctacgtgctgcttctctgcttcctaaaaatgaactttctaaataatctgtatgcatttaaaagatctccttattcgtattaaagtaatcatttttccaggggaaaatgagttcgtttctcttgccgtatatcattccgctaaacttctctagctgtatttcaaaaaactttttattttcttgctgcctagataaactgtgaaaagcggaactgacatccttattcgtattaaagtaatcatttttccagggaaaaatgagttcgtttctcttgccgtatatcattccgctaaacttctctagctgtatttcaaaaaacttttttattttcttactgcctagataaactgtgaaaagcggaactgacatccttatttgtactttcttatattttctaatgaacttgatggtgcaaattttttcctgatttatcatgatgatgcaaggtccaatttccatggaacaaatacatgatgaaaggtataaagaaaacgatgataaaagccgttaataataatgttaggtacgtatgtttttgttgcatgctgtaagcagctggtgggaagaatgttacgacaaacccgaaagctgataaaactaaacctagaacacccatgatgacacgcattacttttgatttggctgcacggaatgtccgatgcaaatcgtcgtgtttgaacactaaaactaaataagtaacaaacatcagcatatacattaaggtatacagagcaaccgttaaactcatcgctgtttggaatgaaaggtttgatttgtctccaccggcaccaaaggttagtaacgcagccatgattgagacgatcacaccttgcaagatcatgacgttcgtttcgacaccataaggatttattttagcaaagcgttctggcaagtagccttctttcgctgcttcgtacattccagcatttggtccaacgacccaactgctgatttcaccaatgatcccaattgctagtagcaaaccaatcaaccgttcaataaagaccacattgatccatggaaattgttgaaccaaagcgccataagcataaacaataccagtacttaattgaattttggcattgggaattgttgccccgattgaaatcgttccgataatatcagaagcaatcgcacaaattgccaaggccatcattacttttggataaatagatggtttctttaagtctttaacgtgagtagctgaaccttccgcccctgcaaaggctaaaataaatggcacaaatccgactaacacgttgccgctccagcttgatggtaaaatcgtgtgtggattgattttgattagcataggattaccctttactaaataagtaatcgttaagaacaacaatagaaagactggaataataaccccaattgtaaaactccattgagcaatttttcctgtgatttttgttccccgttgttgtgcgaagatcaagccccacaagataaccatcatgatgatgaatttgaacaatggattcgtattaataactggaacgttgaaagtgattgataaacagccaatgatgaaatacatcatggtacacataccaactgtgatgtgaatccattggtaaaatagagcagaccaacctaggcgttcacctagcatatgacgtccccaagtaaagatcccgcctttactccagccatcaactgaagccatttctccagcggaccgagtaacgggaatgaaccatagaatccctgctaaaaataggaaaaacaatgctgttggtccttgtttagcgaaggccgcaaaaccgtagactgtcatgaccattgaagtagtcattgagaatagttgaacacctgtgagctgattatgatcgctgatagaggcgttcttctcttcgttattcatttgtgacacatcctttaaattcattgcaatcgaagtgcgcacttttcgaactacagccatcatcatagactttacacaatcaaagtcaaaccacgccagacatagcaaattagaaaaaatattaaaagacatgctgtcaccacgatggaagaaaacctttaatcatcgcccttttccatgaaatctagtggtaaataaaaaaggtttttaagaaaaaaaggaaaaggttcaaattgtgcaaaaaatagacgcaaacttttagaaagccagcacaaattttttgtatcaaatgatagttctcacaaaaaaagcggatgcaaaaaagaatcctcgcaattatctttaaatcaactttcacatagtgcttacccctcctttaatcattgcggattatactagtgaccttgagggagtgttaattcatgagcatcgatctattattagattttgaaagtcaggcgctttttgccatttttacttatttaaaggaaaatccaggctttcacgatatcaatgaaatttcagagcaaattggttttgaaaaacgaacaacgttgaaatatttagagcgtttagcgatgctttctaacgaagtaaaggaacatattggaatcgatccgctaactatatcggagcggaactaccgaattattcaacaaaattatgtggagaacaaagaattgagcttagccatctatcacatctcgatcaagattgacctgctggaggggttactgctaaataaagaaaatacgatggattccctgacggacaaatacaacctgagttattccaccttgaaaaaagatgtgtacgaagtgcgggatttccttaaagaagccaatattgatcttcatattagaaatggcgagattgtattatccggtttagaaccgacgattcgcctcttcttcttgagcttcttttggcagctatacggcggctacgggcatccctttaatatcgaaaattcgactgaaaagaattttatttttgagaaactcagctttctactttcagatcaaatcgacccgatcactaaaattcaatatgattatctagtagatattacgctgatccgttatctatccaatcatccgattgaaaataatgaactgccggtggaatccatcctgatcggaaataaatttgtccagcattttcattttattacggaagaaaatgtctcggcttacgcgaattttaaagatgaactttattttatgctattattcttacaatcaaaaatggtcttttatcgcaacaccagcttcttccgtgaaataaagaaatatcaccaagagatagattcaaatatctatcaggccaatcagttcttttttcaaaacatcggtctgctttttaaccaatttgaatttgactatgacgaactggaaaaagaactatatgtcattcatacacgcttattgttcaaaagcttttataattatgtaccaatcggcgagcatcacaatctttatccggaagatatggcgattgtacaagaaaatctgcgggttcgttttgaaaatatttgtccacgtaatagcctaatttattcacagcttgactacgccatttttctttacgccgctttaagtattgctaatgaatttatgacagaatatgaattatctatttttattgatgattcaaaaggcgagtttaattctatctggctaaaaaaattctttatgaaaagtactaacggactagttaaattgaattttgtcgatccaaatcgctttttattagccgatgaatctgttgatttgattatcagtacgaataaatttttcccaatcaagaacgtccacaacaaacccatcctgtttctagaatgcaaagacaaatacgaagacctgaaaaatgttcaatcgatggttcgaaagattatgatggagaaaaataaattgctgcaagtaaaataaaataatgaacactttccaaacgtaaatctgactttttggattttattagaatattttcattttatagaagacatagccagcaaagtatcccatgcaaaacaattattctatgctatactacccacagttagtttctctttccaaaataaaactaacgaacgaagacgatcgaccgacatattcgatcgtctttgcgagttcttcttcctgctttagcaggttagtagaatcgtatgcgcgacgacaattcttacatttttcacggattttgaaaaatgtttccttaatccggcgttagctgcgagttcttcttcctgcttttagcagattagtagaatcgtatgcgcgacgacaattcttacatttttcacggattttgaaaaatgtttccttaatccggcgttagctgcgagttcttcttcctgcttttagcagattagtagaatcgtatgcgcgacgacaattcctacatttttcacggattttgaaaaatgtttccttaatccggcgttagctgcgagttcttcttcctgcttttagcaggttagtagaatcgtatgcgcgacgacaattcctacatttttcacggattttgaaaaatgtttccttaatccggcgttagctgcgagttcttcttcctacttttagcaggttagtagaatcgtatgcgcgacgacaatctaatgaacgctttcgcttctttcgaaaaaattcttccctaattcggagttagctttcacgtttagatacatagttaaaaagccgaaatcaaaatcagattgctgatttgatcccggcttttattatccttgaatttccgcgtatagctccctattattttttcattttgtttctgagccgctggctaattatcctctcctcctattaatatatagatagagtatgaataatccaacacctgtaataaagcacatggcagaaaatagaatgaaggttctattggcaaaactgcctgttcttggcaagattcctattcgatgataattttttacttttattgtgatttgattctcgtcttcatctagtataacggtgttagttacccacggatgatcgtcaaatgacaccacaccgttgtcaaaaatgtcaatggtaatttcttcctctaaaccagtataaccatttggagctgtgagttctttaagataataaacacctggctgtatgtctgtgaatacaaaggttgaaccagaagaaatcgtttcgttgtacgctcctgatgaatttttcagacgaaatgccgcaccttcgatttcatttccttgttcatcagtcttaataacagttagtctgaacttatttaattcattaatgatcgttttattgggtgaatcagcaataactgccgcaccatccgacctctctgccactgtaaatgtgaaatcatcacactttttgaatccctctggaacaaatgtttcacttacttgatagagacccgtaggaagattagtaaaattaacgacccctccattatctgggataacatcacttgcaactactatacctgttaacgtttctgtcaaagtaaatctcggtcgtttgtcatctgcaccagtaaaaggttgcccatttttcattactttcttaaatgaaaaatcagtagtcagcaatcgattcgtgatagttattcctgctgggtctagattactagacgtaaaactctcctgactgtaagttggattggcataactcggtactctattcttatctccaattctttcaataattcgatactcgataataggatttccagaaactgctgggaagcgagctgcccaactattttcttcgttcaaatggacttcgtgtaaattgacccattgagttccgtcttttctttgtaaaacagccgttatctctcgacgcattttccaacgattattttcatcatctgaccaaactttttttactggaataacaaaatcttcattgaacgctcgaacagatggaacaccaaaatctaatttgtcctctgtacgattgggcatagagtgtaatacggttttcccgttggctgggtaccaacttccggaagtaaagcttgatgcctccgttttcaagcggattttgtagtttatttcaatttcctgattcccataaagattgatatttgttacttttatcttccttggatcagagctgtcaacccttgccattttgtctgcatcaatcgcttttgtgcctaatctatttcttaatgaaatatccgatacaacaggcgttcccactaattccaccatatctcccaacggatcttcaatcacaccttgttcaacagtcataagcgtcgattcaaaccattcccggaaggatttttcaaaatcagttagattttgtgcttggtagaaatagtaatctttttctgaattaccagtagtattagctctttgagtagtcattttgtaaagtccctttactagtacttccgcgctatggaattctccagccccaccataggctcccatggcgatcgcttgaatttcaatccctttgtctcttaaatctgccgcttgagaatttgccatatctaaatgagattcgattaggagtctattgttaacatttccaggatcttcaatattagtaattctaaaccttctatccacagcaggaggctccagtccattgtacagcacataaagtgaggtcgctccattcgaaccgagtgtcactcctgcatttccatccgtttgtcctgaagacagtggtttatactgagtaattcttactttggaaggaaaaattgccgtatcccttttgcctgctaacgggtccttgcttctatttggggctccatcagttaaaagaaagagaaactttcttcgtccattattatctgctaacagtcttttttgtgcttcaatcaatccaccttgcgtataggtctggtggttttgcgtactagcattgcgataatttgtcactaactgatcccaatcactgtaccgtgatgacaaattagatgtactgatcacattcgtgccaaatacaacactgccgatccttagatacccattgtcaggaacattgtttttaaactgagtaattaaatgactcaaagaatctactgaaacatcttttcgcagtcttccaccaattttgtattccggttgagtaaaggtcattgatgcagagttatccaatacaaacatcacatcaacaccaggtctggtaagcgagtctcctcggacattcaactttacgttaaactcatccttcttggttgtttcagtcgcatatttccttagtgcaatatcccctttctcttttccgccaacgccgtaataaatataagaatttgtataattatctgtagacgtgttccaactttgaagtccatcccaaacattagcggctgtattatcctttccgccttgatgattgatcacattcgtctgaccggttggctgccaagaatattgtggatattttccattgtctgtcttatagcttggttctttattggtatatgaattggtccgagccaagtttctagcgtttgtcaacgctggtaaatcaatggcttttgaaaaactattttgttccgaataaagtgaaaaactaccttcagcttcagtagtttgattcccctcgttgtcttcaggtactgatttttttggagcttttttcgtagcttcttgttctacttttaaccagagagggtcacttaattccaatatatcagtatcagtatcagtatcagtatcagtatcagcttcggctcctgcttgttccttctgatttttttctgtattttgttcatttaattcgagatacatttgaagcttttcctgtttcttagggaccgcgatcgtgagttcacgctcttgtgaatgtgtaaaatctttttcaatcagccatccctctttttcttccattccgtcgactacagggtaatcaatgactttttctttttccgtcactatttttagttttaagcgattttgctgttgttcacttttcccctcgcggcttaacttaatatgaaagagattttccttatctgtccgttctgttttgtaggaaaccttcaaaaatgactcttcaatcaatacactcgcgtcgttttccgcaattgttcgtgagcttgcacccattaaacctatcaaacttaaaaagattcccccaattaaaataagaaccctcttttttctcccatgcatacccttaccccctttatcccaagctatcccttcgccattattttataagacaaaaaaaagttccgcaaattacaaaataattgtatttaagttatttataactgcaaaaaacacgaatatttagcccgtattttttgcagcagtcatcaacaaacggttattaaatcactttactttagttttcattaaaatttataacattcatttagttgattatcgattaagtatattagacatataaagtcgaatatttattattaaactgacaaaaacatgaataaacggcttggttactcattttttgctatcaatagtgcttttaagcaattctgaattaacgattgtcacattaagaaaattaaaaataatttacaaaagagtgttgcactaaccaatgtactttattttatctaaaaatattttagttatttaaaaaagacaaaaagcgatagatctattgatttttctatttaatagaacacccttataaaacaaatcgaatacgttttgcctcttaattggtcgatacaggataggtacattgaaaacaataaaaaaatcgagccgcagctcgatttttttacgcatatgtctgaatgatttgcaccaacgcttctgttgctcctgccccgcttttttcgtcataatattgagtgaaacgttcgtcagctaaatacatctcagccaatcccttatgagcttcaccggagtaggctttccagctgaagctcagccactctttatgcaactgataaatttctttagccaaagacggtgtctcttctgtcaaatagttactcaatttctcagttagcgcagcttctgttgcctgcattttttgataatcggcctcactcatattttgccatttttgattcgaggcctcgactgtttcttctccatatttttcacggatttcttgtccgtattttgcttcattttctgtgagcttttcttgtttgaaggcttcaaatttttctttattcgtcataattatttctcccttatagtaacgcaaggtcttatcgattgtttccagcagctgatcaagttcttggcgcttttgctccaattggattttttgctgaatcaacgtatccgcgactttttcgtcaggtcggtccactaattccttaattgttttcaatggaatccccatcgagcggtacaaaagaatctgttgcagccgatcaatttctttttcggtatacatcctatagcctgcctcacttaaaaaagctggctttaataatgagcgctcatcataaaatcgcagcgtccgtgcactgacacctgaaatttccgccatttgtttcactgtatagttcattttgtacctcctgacaagaacatcttacaccttgacgtaacgtaaaggtcaagggattctttcatcgttaatttagtttttctttctataggaaatcattttctcaaaaaatcgagaaaatgagttttattttcgtttcgcatatcattatgctaaacagcttatctactatttatgctagaaagcatagatacatctcatcaattaacaaactgcgaaaagcataactgacaactagctcagtcataatgtattcattttcctaaaaaccaggaaaatgagttttattctcgccacgcatacgattccgctaaacaccactactatttacttgttcaaaatctgagatcaatgctcttttcttattaaactgcgaaaagcgtaactcgcaaaaaacccctcttagaataaaattctaagaggggttctcccagtaccaaataattgatagaaaggttcttcgtccactaagcttctttccgacaccctgaaatccgacaggtgacttgcgtcgtgtgcctctggtatcgaaggatcaatctttcagatccactcgactcgtcgcatgagacaaactatagcacatccgcttagtctttgacaatcatttttgatagttcttataaattgcttccgtgatcgccactgttttcaaggtcaattctttggtgacaattggactttccagtaatccttgctccagacaagcattcacatgatcgacttcaaaaacaaactcactgtgttgattactgtgaagcgtttctttttgcccatcattataatgaatttcagctgtatctgttttccaaaaatcaggaataatgatttttcccttttctccgtaaataatcattcgctttgatagatctagatcgacagtcaaaaagatcgtaccaatcacaccgtttggaaaattcaaagttacctgcgcttgcgcgtcagattgtccttctggaaaagtcagcgttcctttgaattcctcaggtgaagcccctaataaatgctgcatgtattctaacggatacgttccggctcctcgaaaaacaccaccgcccgcacttaaatcacggaaccacgaaatatgatcaatgttgggataggctgttactgaatctaaccagcgcagcgttccgatttttcctttttgaatcacctgctgaatttgtttggtgattggcaggaatagcgccttttgcgcctccattaaaaataaattgcgttctttagccagcgcaaataattcctccgcctgagccagcgtcatagtaaaaggcttttctaatagaacatgtttattattcaacaatgctaattttgcggcgtcatagtgccccttgttgtagaccgccacataaacaatatccacatcttcactttgacaaagctcctcgtaactgccataagcttgtggaatgtctaactcttgagccattttctgggcctttttgatttcacgagatgcaattgccgttactgtaccaccttgactttccttcactcctgccacaaaacgtggaacaacttgagctgtacttaaaataccgtaacgaatcatttcattttctctcctattcattttaaatcaataatgaaggaactgattcgataaaatcagtcccttgcttgtttcgattctaattttaaagaccagcgaatgttttatttaagacgaataaacagaaatagccgtaggaagccaccgaccagattttaaaaatcaatacgatcttcagatactcccgaaaagagagatccgtcattcccgcaaccagacaggttaggtcatctggcaaaaatggaaatataaaacaaacaatcaatagctttttgatgtcttgagtatggtcttgcaacgtcgtctcaaatttctcaaaatttttctcagacaggacgagccgagcaaatctcgaaccaaaacggcgaaccaatagaaacaatccgacttctccaatcaccaatcctatataactatacaaaactcctggaatattaccaaacatcagcattccaacaatcgtagcaaacccgccaggtaagaaaggtacaatcggctggatggcctgcacaacgataaaggctgcaatagcaaagttaccaaaattcttgataaaatgctgcaaatcagcgacagaactaaaaattccagaatgtctaatgtagatcaatataataataaaggcagctaggccaatggctggtgccatttgaataactttctgctgccaaggagcgcgctgttttgttttttgtgccatccttcccctcctttatctggttaagttgttttctagctcattattgataaaattcaccaatttgatcaacgtatgggagtgattcttttaatggataaacgacaaaatcatgcatcattccttccacaacctctagacgcatcgtggttccttgactgcgtttaatgcgatcctgcagccgcagtacgtcaggatataaaatttcatcagtgccagcaacgaccagaagttccccaagctgatcaaaattaccataaatcggcgaaaccatcggatcggtcaacggtaattcccctgcataattttcgccagcttccgccaacaagtctttttctaataaaacatcctttttctgcaattcctgagaacgcgggtcactcaatgacgcatctaaccatggtgaggctaaggcgattttctttggccgcttcggcagatcaatattccgtaggtgctgtgccagactcatcgctaatccgccgccagcagaatcaccaaataggaaaaagcagtcatctggatataagtacgccaactggcgaaaggccagctccgttagaggtaccgtcttttctgccgtattctcaggtgctaagggataatcgaaatagcttacttttaaattatagcgtttcacaaaacgctcttgaatttctttatgaaatggcgatgcttctagcgcataccctccgccatgtagataaaacacatgacgtctcgtaggatgacctggaaataacgtgattaattgatgtccatcgatttcagcgattttttgcgggatatctgtttgcgaaagttgacggctaattagacgccgacgttttggcggatctaccattgttgctcccacaagctttttcatattgatgactttaaaaacattctttactaattttgctgaatagcgcatcgctttatcctccaaataattcccacataatcgcatagaactcgacgtttcatgctacaatagacacggtggactatcgcagtctgcttcttaagcataacggaatctgaaggaggtgtccacaatcacaaaacaaaatcgtgaatacctttacgataatattcgcggcatcctgattttgctcgtggtcttaggacacgcgttggaatattttcgtttagataacaaggtcggtgagtttctctacgtcttcatctaccttttccatatgccggtttttatctttatttccggttatttctcaaaaaatcttaaaaaaggtcgctccacagctgtggaaaccttccttgtcccttatctgctattaaatttaattttgactctgatcatgctggccatcggcaagatcgaccagttcatgatcttaagtccaggctggaccctttggtatttatattgtatgtttatctggcgtttattgctacctgacctcgtaaaagtacggagaatcttaattttaagttttattatcggaattttctccggttttctgaccgaatttgggacctatatggcaatggcacgaaccttaggctttctgccttattttttagcggggtattatacgactcccgaacacgtcgctcgaatccgcaagattccttttcgaagagcaatcagttttggaattattatttttggaattattaacgcttatctttggaccaagaataatttgccgccggaacttttatggcgagatcgtgcatatgcgttctttcccgttcctttactgcaaaatttactgacgatcgtctttttatacggaattggctttgcctttattttcgtctttttggccctcgttaataataaacctcattttttcacagcatggggacaacgaaccttggctatctacctgcttcatgtttatctagtggcgccattagtagaatttacacaatttgaaaaaaatcctctgcttcatttaattctcttagttgctggcagcggctttattacttatttactgtctcaccctaaagttacagaaattctgcggaaaacacttgcacgaattttacattttatcatgccaaacaaaaacggcgactcgtcatgagtcgccgtttttcagtctaatggaattattcaaaactgctttctgttaagcaagctgtaaagatttccttcaccgctgcttcgtccaatggcacaaacgcatcggtcttaatcgtgctatgagctaccgcttgtttcgccatttcatcgaatttctcctcattgatgccaacttctggcaaggtcatcggaataccgcaggccttgaagtaatcatataacttttgaattccgatacgagccgccaacattggaactttttcttcaacgttccagacattccatgcaaagctggcaaatttatcgactgtttcatcattcagagcatattccatccaacgcggtgttaagattgctaaaccaacaccatgagtaatatcataaaaggcactcaattcatgttccattggatgacaagaccatgcgccgggtttgccgctgccagttaagccgttcaaggctaaggtacttgcccacatcaggttcgcccgggcatcgtaatcatcaggatacttcaacgcgatcggacaatttttgatcactgaacgcatcaagccttcagaaacagaatcttggacatcggttccttctgtccgtttgaaataattttcgatcaagtgactcatgatatcagccgagcctgccgctgtttgatacttgtttacgctaaaagtattctgtggatctaagaaagaaacctttggaagcattgatttgcttccagtgcctaatttttgatgagtggcaagatttgagattactgcaccgctgttcatttcactaccagttgcagctaatgtcaaaatcgtcactaatggtaatgcgccaccttgatattttcgacgctgcaagactaaatcccaagcatctccttcaaatttagtcgccgccgcgacgaccttcgcacagtcaatcgttgaaccgccaccgactgctaaaatcacgtcaacattttctttacgacaaatctctgcaccacgacgtactgtttctactcgtgggtttggttcaacaccggctaattcaaagacttcgttgccgttcgccttcagctgctccatcactttatcgtataaaccgatctttttgatactgcctccaccatacacaatcaagacctttttgccgtattgatttaatacttccggcaattcggccaagcgatctttaccaaaacgaatatccgtcgttacatgaaaatcaaaattctccatttaactttcctcctactgttcacttctatccaataagcataaactaaagttttccagaatggaactaagttcgctcagatatacctaagttatccgcaaaaaattccgtaatctgatccatcgtggcaatctgaacaaagtgccgttcctccgcgctgacaaaggtaatattgtcttgcgaattcgctttaataaaatcagcggtatgttgataaggcaccttttcatcttctgttccatgccaaaagaataaaggacgccccgcaactttttccggagctaaggataaatcatatgcttctaaccacgaagtcagttgccgataatccttcggtaaatagaatcctaattcgccagcatgcatagcgattcgttcgcgatacttgatcggagccggtgaacccattacacaagcagctacattgatttccggatgttgagttaatagcatgcaggtggtaatcccgcccatcgaaatcccgccaacgccaattttccccatgaccaatccaagattttcaaaataatccaccaaaaaaccgaactcgtacaaatttgtttggatactatcccaaaaagtcagggaaggaatctccgaagttttcgtcttacgttcaccatgattcgctgcatccggcaatagtacacggaagttcttcgctgctaattttcgaccttgagtcagcactaattcttttgccgtttgccagccatgataataaataatcagcggcagcggttcataaattttgtcttctgcgacgacttcaagcaaaggaatattaccgactgtgcgtttgcgtacaactactttcatcttattcctcctactaagcatttcttctattatacctagtattcttaaaatacacgaaaaaccgcccttcacgaatgaagagcgattaagatcttattttgcaatcaacgtttccaaccctacatacatcatatctttaaaggtattttgacgttcttctgaagtggtttcttcacctgtcaccatgtgatcgctaaccgtcataatgcccaaggtttgaacatggaatttcgcgcctaagtaatacaagattgcagcttccatctcaacacctaagacaccatattccgctaatttgaaggttggtgctaaatcatctttgtagaaggtatcttctgacaatacattcccaacatgagtagtaaagcctttttccatcgccactttataagatttcatcatcagatcaaaatcagcaatcggtgcaaagtggaaatctggaaaatgttttttcaccattgaagaacttgtcaccgctccttgagcaatgatcaaatcacgcacgtgaacatctttagacaacgcaccgcaggttcccacacgaatcaattttttcacgccataagattggatcagttcttgtgcgtaaataccagcagaaggcatgcccatcccagtaccttgtacagacacacgttcacccttataagttcctgtgtagcctaacatgcctcgtacattgttatagcatttcgcatcttctaaaaaattttccgcgataaatttcgcacgtaacggatctcccggcagtaaaattttatctgcgatctccccttgtttcgcttcaatatgaacgctcattgtattcctcccaataatatacttacttctatacgattataacaccactaagatttctttgattaatttcttgaagtcttctttgacacgttccgtcgtttccacaacttcagcgtggtttaaattcgcctgcatacccgccgctaagttggtaatacaagaaattcctagaaccttcagtccactgtgagacgccacgatgacttccggtacggttgacattccaacagcatccgcgcccattgtacgagccatccgaatttccgctggcgtttcataagttggtccagtgaagcctatgtagactccttcttgcaaatcgatagccaatttatttgcgacttcacgcgctttttcttggtattctttcgtataagctgcactcatatctgggaagcgtggacccatgttttcatcatttggtccgattaacggattagtgcccatgaaattgatatggtcggtgatcagcattaaattccctggttggaagccttcgttcacgccgcctgcagcatttgtcacaaccactgaatgaatgcctaatgctgccatgacacgaacaggatacgtcactgtatccattgggtttccttcatagtaatggaagcgaccttgcatcgctaatacattttttcctgacaattttccatagactaattgtcccgcgtgaccaaccactgttgaaacagggaaatgtggaatttcgttgtacgggatcactacagggttttcaatttcttctgctaattcacctagtcctgaacctaggatcaatccaaatgcaacatctgctactcctttttcttgaatatagcttgctgtttgctgaattttatcttgtaagtctgtcataaacgtctccttatatagaatattttttatttcaataattttaagaagctttcgccattttctgtcgctggcacgtcaaagttttcagcaatcgttgcagcgatatctgaatagtagccttgcggtaatttcccttgtgccgccattttcttgctgtaaaccaataagggtacatattcacgagtatggtctgtaccagtaaatgttggatcgtttccgtggtcagcagtgatcattaatagatcgtcgtcttgcatcgcatctaaaatttctggaattcgtaaatcaaattcttcaatcgcatgagcatagccgacaacatcccgacgatgaccaaacaaagcatcaaaatcaacgagattcgtaaaactcaagccagtaaaatcatttttcattacctctaacaacttgtcaacgccatccatgttgctctttgtacgaacagcatccgtaattccttggccattaaagatatcgttgattttaccaaccgcaatcacatctttaccattgtcttttaatgaatctaaaacagttttaccaaatggatcaagggcatagtcgtgacggttgctagtacgtgtgaagttacctggttcaccaacatacggacgtgcgataatccgaccaatcatgtaaggatcgtccttcgtaatatcacgaacatattgacaaattttgtacaattcttctaacggaatgatttcttcgtgtgctgcaatctgtaatacagggtcagcagacgtgtagataatcaaatcgccagtcttcatttgttcttcgccaaagtccttgataacttcagttccgctataaggcttgttggcacccatgataattccgcgaccagaaaactcagagatttgatcaagcaattcttgtgggaatccttctggaaaaacgcggaaaggtgtttggatattcaatccagcaatttcccaatgacctgtcattgtgtccttaccaacagagatttcttccaattttgtcgcatagccatcatgctccgcaacatccttcacacctttcagtggacgaatcgttccaagaccaagctgttccaaatgcggaatgttcaatccagcttcttctgcaatatgacctaaagtatctgaaccgacatctccaaatttttcagcatccggtgcttctccaataccaactgaatccattacgactaagtgaatgcgcttaaacatttctattccctctttctatttatttatatcaaaataagtaagacgaatcccacttatatatttaacaaaacctttgtgctgttaaactaattgccacagctccagtatattgggttcttagtgttccgtaaaataaaagctacgccttgctaaattatgaaacacccagctaattcgatttaaaggattaacttttttgccagtccgactttgagcaactgcgaaagttggactggcaactagctcagtttagcggaattcatttttcgaaaaccatgaaaaatgattctatcttcgtacgcatacgattccactactataatacgtttggacaattgattcgcagctaattcgcattaaggggttaactttttcaaagaccgaaaaagttagtttcattctcatcgcgcatatcatccaactaaacctcgcgtatttatgcctgcttttaagattttatttttgccagtccgaccttgagcaactgcgaaagttggactggcaactagctcaacttgtaggaattcatttttcgaaaaccatgaaaaatgattctatcttcgtacgcatacgattccactactataatacgtttggacaattgattcgcagctaattcgcattatggtattaactttttcaaaaagcgaaaaagttagtttgatcctcatcacgcataccatccaactaaacctcgcgtatttatgcctgcttttaagattttatttttgccagtccgaccttgagcaactgcgaaagttggactggcaaaaagggcgcgactaagaacattgtcccatagccccaccctttgaaaacgaaagaattattttgatttgatgtaattgacaccgtctgcttttggtgctgctgcttttcctaagaaaatgaccaataccacaatggttaagacgtatggtgccgattgtagatacacatctggaatttgtgaaatgatcggtaagtttgatcctgcgatactcaagttttgcgcgaatccgaagaagatcgcagctcccatcgcacctaatggattccatttaccaaagatcatcgctgctagtgaaatgaacccttgacctgcgatggttgtttgtgcaaagcgtccagcgatggattgtgcaaagactgccccgcccattccgccaaggaaaccagaaatcaacacacctgagtaacgtaatgcgtaaacattgattcctaaagtatcagctgcctgcggattttcaccgacagaacgtaaacgcaaaccaaaacgcgttttaaagatcacaaaccaagaaagtaccgcaatcaaaattgcaaagtatgctggcaaacttgtatttttaaagaacagatcaccaagtacaggaatcttacttaatcctggaaaatcaaaataaccaaattgctgttggatcgtgtctgtttgaccttttccataaatcactttgatcaagaaaatcgctaatggcggtgctaataagttcattactgtaccactgatgatgtggtctgcacggaagctaactgtcgcaacagcatgcagtaaggagaatgccatccccgctaaaccaccgactaaaacacccaaccaaggagtcattgcaccaaactgatcggcaaaagctaagttaaagaccactgaactaaacgcccctgcaaccatgattccctccaaaccaacgttaacgatcccgctgcgttcagaaaagacgccacctaaagccgttaaaatcaacggtgctgaatatacaagtgtctgagcaataattgaagctactaaatccatattcatcagactttgccccctttttcagattcttcgttcggagcactttctatttcttggacagtagcaacttcttttttaccgcccatgacttttgctagaccaacacgtacgatgtagttgatggctacgaagaagatgatcaacggaattacactattggctaattcacttggaatacctgaaaactgcatcccttgtccgccgagcttcaagatactgaacagcagtgcggagagtaaaattcccactgagcttccgtttcctaacagtgaaaccgccattccgtcaaaccctatgctgactgatgttccttgaacaaagtaattcataaatgttcctagtccataaacgacaccaccaagaccagctaaggtacctgaaatgatcatggagatcacgatcgtgcgtttactactcatccctgcatattcagaggcaaaaggattcaaaccaacggaacgaatttcaaaccctagcgttgttcgtttcattaagaaccacacaagcactaagaagactaacgctaaaataatacccatgttgacccgcgaaccgccaaataagtttgttaaccaaggttcgcgtaatgacgcattcaagccgacacctttagttacacccttgtttgaaatgatatctggtgacattacatgattaacgatatgattcgctacatacaaaatcacatagttcatcataatggttacgataacttcactggttccaaagaatgcacgcaataatccaggaatcgctgcagccgcagctccggctaaagcaccagcgatgatcgctaatggcaaaacaacgaatttcggtgaatccggcatgcttaatgcgacccagatacttgcgacccagccgcagagcgcttgcccagacagcccgacgttaaagaatccagctgaattggctactgagaaccccagcgcagtaaagattaacggtcccgcaccaaccaaaatttctccgatagacattttgctttggaatgcggagctaaacattgcgttataaccttcgattgggttaaacccaaatactaacatcaaaacagcaccaagaacaaatcctaaaataactgaaataatcggtactaaaatatttctaattctttctgagcgatcattcatttgtctcaccagcctttgctaattctgctcgcgcttcttctaaactatagccggccatcaatagcccaagctcgttttcagaagtttctttcggatctacgataccaacgatctcccctgcatgaataaccgcgatacggtcagagacatttaaaatttcatccagctcaaagcttactaatagcacgcctttttgcttgtcgcgctgttcaaccaaacgcttgtggatatattcgatcgccccaacatccagtccacgagttggctgtgatacaatcagcagatctggatcacgatcgacttctcgtgcgataatcgctttttgctgattcccgcctgatagtgaagccgctggtgctttttcactggttgtccgtacatcgtattcttcaatcaagcgcttcgcgtaacgatcaatctcaccgtagttcaaaatacccgttttactaaatggttcatggtagtatgattgcaacgcgatgttctccgataatggcaacggtaaaatcaaaccatatttatgacggtcttccggcacgtgtccgacgcctgtttcagtaatatgacgcggcgctttgcctgttacatcttttccgctaattgtgactgttccgctttcgactttacgtaaaccagtaagagcttggatcagctctgtctgtccattaccatcgattccggcaattccaacaacttccccgcgatggacatccagcgaaagattcttcactgcctctaagccgcgactttcttttacaacaagattcttaattgaaagaacgacttcgcctggcgttgctggtaccttatctgttttgaatgaaacagaacgtcccaccatcatatccgctaattgctgcgagctgacatctttgacgtcgaccgttcctatgtattgtcctcgacgaataacggaacagcgatccgcgacttttttgatttcatctagcttatgagtaatcagaataatcgatttgccctcattaattaggccttccataatcgtaatcagctcatcaatttcttgcggtgtcaatacagccgttggttcatcaaaaatcagaacattcgcaccacgatacaaggttttcaaaatttcgacccgctgctgcatacccactgaaatgtcacggatataagcgtctggatcaacttttaacccgtattcttcagataaacgcacgatctcagctttagctttctttttgtccagcatgccgtttttcttcggctcgctgcctaaaataatgttctctgtgacggtaaaggcatccactaacatgaaatgctgatggaccattccgatccctaattgattggctttcgttgggcttgagatatcgacgggttgaccatccattagaatctcaccagaagttggctgtaatagcccagacaagacattcatcaatgttgattttccagcgccattttcacctagaagcgcgtgaatctcgccctttcgaatctgaagattgatgttgtcattcgctttaaacgtaccaaattgcttggtgatattgcgcatctcaatgacattttgttcttctgtcactttcttttcacatcctatcgctttttaaaacctgacaaaacattgcaacgctaagggcgttcttcccttagacaaatcaagcactggctgtgacttgtctaaaagaagaaaactttttttaaaagaggaccatagcctcacgcgttggagactatggtcacctgaataattatttctcaggagtttctggaactttgatgtcgccagcagaaactttttcttttgcttctttaacagctgctttcgcatcgtctgaaagatagccgtctgttaaatcaacaccgccgtctttcaaaccaaatgataagtgtttgccgccagggaatttgtcattcaatgcatccgtagagattgattgaaccgctgcgccaacgcctttaagtgttgaagtcaaacagaagttgctttctttaccgtctttagatttgtatttgccatcgttttgttggtcgctatcgacaccgataacccaaactttgtcagcttcgtcagctttttcgttacgtgctttcgcttctgagaagaccccttgaccagtaccgcctgaagcatgataaatgatgtctacgccagcattgtacatgttcgctgccaaagctttccctttagaaggatcaccaaatgaagccgcatattgtacgtctacagaaatgtctttgtctaattttttagcagtatcttttaccccttgaacgaaaccagcttcaaagcggtcgattacggcaccttcttcaccaccaacaaaacctaatttatttgattttgttgtttcagctgctgctacacctgctaggtaagctgcttcttggtctttaaatgttgccgaagcaacgttatctttgtcttcaatcactgagtcaatgataacgaagtttgtatctgggttttgatctgctgctgctgagattgggtcagctagtaagtaaccaatcccgaaaactgttttgaaaccgttagtaacagcttgtgaaatattttgttcatattcagaagcatcgtttgattggatatagttatatccgccagtaccttttttgatatcgtgttctttaccccatgcttgaagaccttcccaagcactttggttaaatgaacggtcgtccaccccaccaatgtctgttacgattgctacactgtgttttgcatcgtctttggccgctccgcctgaagaatcagttgaaccgccgccactaccgccgccgcaagctcctagagtcagcaacgctgccattgctacggtacctaggccaaataattttgcttttttcatttctgtaaagccccctaaatatgtttttttcaacagtcctgcgactgaatgaacatggtttataaatctttgtcagtaaaggtatacggcagtaactcttcaacggtcatttcttttgttactccgttgtcaccgactaaggttactggcatcgctggatcgcaaaattccgccataacttgacgacatgcgccacatggagaaatcggttctggtgtgtgaccagcgactactaaatgactaaaggctttttcgccttccgaaacagctttaaaaatagctgttcgttctgcgcaattcgttaagccgtaagaagcattttcaatattgattccttgataggtttttccttccttcgtcacaagacatgcgccgacaggaaatttcgaatatgggacatacgctttgccgagtgcttcaactgcgatatcgatccattcttgcttactcatgtgtcatgcctccgttttttagtaccccgtaccagaaagaccgttcataatagcaactcctgagctggcacctaaacgagtagcccctgcttcgatcattgctgctgcttctttggcattatggataccaccggaagccttaacacccatttctggaccaacagtttcacgcatcaaacgcacatcttcgactgttgcgccgcctgttgagaatcccgtagaggtttttacaaaatctgctcccgccgctttggctaattcgcaggctttgactttttcttcattatttaatagagaggtttcgatgatcactttaactaaggccttatcttttgcggctgctacgactgcttcaatgtctttttgaaccttttcgtcgttgccatctttcagttcgccgatattgataaccatatccacttcatccgcaccgttttgaatcgcgtttgctgcttcgaacgcctttgtttcagtagtatttgctccaagcggaaaaccgatcaccgtacaaactgcaacgggctcaccctgtaattctttggctgcaagcgacacccatgttggattgatgcagacagagtaaaagcgatatttcttagcttcttcaataattttcattacatcttctttactggcatccgcctttaaaattgtgtggtcgatcattcgatttatttccatttctgaccctcgcttctttcattataatatactttttattgttacaaaaaagttttaaatacttattctgtaataatatcgtggattaaaataggctcttttggctcttcaccaatcgaaatattttcataaagtaatttttctacttcgtcaatttcattggagttcgcgtagattgttaatagcgattcgccttcagcaactttatcgccgacttttttatgcagcttgataccaacggcatgatcgatatcttcttctttcgttttacgtcccgcgcctaacagcattgctgcaatcccaatttcattggctactaaatcagtgacataccccgaggttttagctggcaactcaatttcatatttagcggttagaatcttgtccgtttgatcaattactgttgcatccccaccttggtctttaaccatttcacggaatttttctagcgccttaccagaatgtagggcttcctctaacatcgctctggcttcatccaacgtcgccgctttacctgctaaaacaaccatctgactacctaatacatagcacatctctgttagatcagctggtccttctcctttcaaggtatcaatcgcttccacgatttctaggctgtttccgattgcttggcctaacggctcagacatatccgaaatcacagccatcgtttgacgtccagcaagctttccgatgcgtaccatagttttcgctaaacgttttgcatcatcgatgtttttcataaaggcaccttcgccggtagtcacatccaaaacgattgcatctgcacccgctgcgatttttttactcatgatcgaactggcaatcaacgggatggaatccactgtcgctgttacatcacgtaatgcgtacaacttcttatccgctggagccagatttcctgactgaccgatgacagctactttactcttgtttacaatatcaacaaattcttgatcggataattcgattttaaagccgggaattgattcgaatttatctaaagtacctccagtaaaaccaagaccgcgtccagacatttttgctacaggtacgtctacacttgctacaagtggcgcaagaaccaaagttgtggtgtcaccaacaccgccagtggaatgcttatccaccttcacaccctcaatagatgacaaatcaatgatgtctcctgagtttgccatagccaaagttaaatgagaaatttcctcatccgtcatgtcctgataaaagattgccattaataaagcgctcatctgatagtctggaatacttccgtctgtatagccatcaatgatgaagtcgagttcttcttttgatagggcattaccgtctctctttttttcgatcaaatctaccattctcataggttttcctccaagcttcaaaagatattatacaataaaatggcgaaaggtaaaccactttagtaaaacagtttactaaatacagaagcgctttctgttagcgctgccatcgttactataacgggtactgctcccgttgtcaaccctgatctacttttttaacactctcacgaataattaatttagtttggaagattttattcggaattcgctgagaagggaaattaatggcatctactaaaaattttgctgctgaaaagccaatttcactgctcggctgaaagacagttgtcaaaggcggaaccatgtattcactaacttctaacccgtcaaagcccacgaccgaaatgtcctcaggaatttttaatcccgcttcataaatcgcttgatagcaaccaagagccatctcatcatttccgcaaaatatcgccgtgattttcttattttttaatacctctcttgccgcatgataaccgccggagatcgttaattgtccagaacaaatatagctttcttcaaatggcaatttatactcaaaaactacctgccgataggccttcacccgctcagttaattgataatagccttgactctcttttaacatacctatatgacgatgccctttatctaccaacatccgcaggacttcttgtgccccggcatattcttctactaatagctggccccaatcgcgatcgttcaagcctcggtcgatcaaaacaatcgggtgtttacggtaaaagtcactgcccaacttgtgttctccctcaagatgattaggcgtggccaacaaaataccatctactgaccgatgtgacagctcatttaaataacgtttttcttgttcaatatcgtggcgagagttacacaaaatgatcatataacctagaggatttaaataactttctactccttcgatcacctttgagaaaaaaaagtcggttacgtccggcacgatcatcccgatcgtttttgaatgacgattaatcaagttcgctgcaaaaaaatccggtttgtattgatgttcttcaacaatggctaaaacctttctgcgcgtttgttcgctgaagcggctgcctttattatttaaaatctgtgagacagtcgttactgacacgccagccatctcagcgatctctttaatggtgatcttcatcacggtccctctctttgcgttttttttaagtgtagcaaaggaaaaaatagaaagaaagcatttttcttcaaaaggccggacttcttgcttattctgtaggaaaaaagtggaatttaaaggctcctagaaataaaaagtagttaagcaaatagcagacgttttaggtgccatcaaaaatcagcaagaatttatgcatcaattctaattagcctacaccgttttcgcacgattcagatagtttttgaaaaaagactatgatgtgcccaacaaagactgctggccattttatttaaatctataaaaagcgagataagatgattgcgaattaaacatataacgaaaagtatcaaattctctaaaatgattatgaaccaaaaaaatctaagctgtgatctttttgataagcaaaacagtgaaaaaatgaatctaggcgtcgcgaacgctgcattttacaaatgattcatcttggattatgtaaatttggagcttttaaagtaggcaaggtttttatctcgaatttcaaataacagcgatccaatattcatcacgatttttataaatagtttactttctttttccagtgcctataaattacagctttcactttctgaaaaagatgtactctgtaacgcaaaaattaactgccggtactgtccataatgaagtctactcagacattgccaatcaagtcattttaaaagagcatctataaaatgaactgccgcagaatcagttcttttctgcggcagttcttattttatagttacataaattgcgtaccaaaacccgaacgttggtacagtagaaaatgtgaaaacgtttgatttattcatttacttaattaaaaattaaatatttggataattcttcaaaacataattttcagccttctgactccaaataccatctgtttctgctagaatttcgcctaattctgaattgttatcaatctctgaaagttttttcagttcagattgtttatgggtataaactaatttttttccgccgccaatcgctggttgattcaacgtggtttcccctactgcatccaatcctagaatatgggtaacgacattggcaactttaacttgcttatcctcaatcaattttaccgccttgcgcatgtcctcggtattaccgccagacgttcccacaaagtgcgtaaaggaataatgcacatcgtaaaaattcacctgcgccgaaaactctttgtcctgcggtcccgcgaagaagttcaggcagccatccggattcaacatgtccgccgcatccgttactactggtgccactggaatcattacaaagatatcatcgaagcctccatctgctttttccttcaaaagactgacttgatcttcaacatctgctacatttatatatgaaacttcaataccgttttgacttggatagagcttttctgcacgagctaatttttccgcatcacgatcggtaacaactaatttctttggtttgatgggtccatgcaaagcataatcgattgctaataaacccattgggccagtcccgcccatgatcaatagattcccatcagctttgattcccatcttgtgttcataggacccttcttttaaatgataatttgcttcaaaggcgccaattacacaggataatggttcaatcagtgagccttcaaaataggtatcacctttataagggatcaagcagtcctgattcatgacatcttctgagatcacgatgtaggtcgcatcgccgccagtgtaaggatacgaatagccgggacaatctggacgatccggtaattgcaagttcgcctgcaaaacataccgctctccttttttatatttatgtgcccatttgccgccaacttccaacagttcgccacaaaattcgtgaccaataataatcggattttccgcaagattattgggcgcttttttatgatccgccccttgattggctaacttccacgttgacatacaaatactatcagtgatgactgaagccaaaatctcattctctttgatttcaggcaattcaagttcctctaaacgtaaatccttcttaccatataaacgtactgctttcgttttcactactgctccccctaatttcttctataatattatgctaaaattcctaaccaataaccgatgattcctactgcaaacaacacaaaaatcaaaacgattgggctgacttttttctttagtaaatacatcatcaacaaggtcaaacctaacgctggtaaacctggaactaaatcatccaaaacattttgcacagttgtaataactgttttgccatccgcacctggtgttttcgatacgactagcggtatattgacagtggtccatttcgttaccagaacccccatgatgaataatcctaaaattgtcgcaccttcagtcaatttctgtaataaattgcccgacagatctttaacaatatccatccctttactgaagccgtaagtcaatccaaaccatttcatcgccaagcgaatcacgttaaaagctacgaagaataaaattggtcccatcacatttccagataaagccaacgaggcacctaatgctgcggtgatcggacgtaaggttccccaaactaatggatcgccgacaccagctaaaggtcccatcaacccaacctttaagctattgattgtcccatcatcgatatccgcaccgcttgctcgtgcttcctccatcgccatcgttacgccgataacaggtccgcaaacagctggtgtcgtattaaagaaagtcaaatggcgtttcaaggcttctgcttgttcttctttggttttatacactcgacggattgtcggaatcatatccacacaaaaagccaacgcatgaatccgttcaaagttaaaggacgcctgctggaagtttgaaaagacaaacgttgtcatcaaatcttttttcgttaattgcgattgcgcataaatatcttttttcgtttctactgttgaagtattttccatttgtactcctccttaatcttccagctcatcatcggctaactcgccggcgacaactgctgcgacctgatttccttgaacctcgtttttcttaaagttcggatttaactgcacgtaaatcaatgcagtaattagcccgataattccaaacgccaacaaactaaactctaaataaccgcccatgacaaatccaagatagaagaaaggcatcaaatatgccacgctcatcatattcaagaccatcgcatatccgacaactacgatgaacccaccggcaactgctaaacctcctgtgattacatctggtatcatgttcaacatatttgtcaccatctcagcgttaacaaaagccgccacaatcgtagctgggattgctactcgtaaagcttgaatgaataaggcactgaaatgaaggaagataatcttattgaaatttgctttttccgcttcacgatccgctgcgtgttgaaaagctaccgtgattgtccgtgcgataaccgtcaatacttgccccgccgctgccactggcaacgcaatcgcaattccggattgaatatcctgctgaccaacaacgactaatatagtagaaatcacactcgccagagctgaatccggtgactgcgccgccccaatattcatccagcctagagcaatcaattctaatgttcctcctagaataattcccgtctgcacatcgcctaaaatcagaccaaccatcgtacacgcaatcaacggtcgatgcgtctgaaattcatctaacacactgcccatcccgcaaatacaagaaaaaagaaaaataagtacaatctgcaacgctgataattccattattgtgtcctcctatttcatattaaggtaatcatttttctcaaaatgagtttgatgttcaatacgtataccactccaccagatttttcagtactcaatagaattttatcttgcttacaatttttacctgaaaaaagtggaactagtatcctgcctccttttagaaccctgcttcttttagcttctcttcaaaattacccttcggatcggtcgcaacgactctcaaatctaactccacacctgctgcttcaagcttgcgaaatgcatccgcttctgtttgatcaactgaaacagctttggtgatttgtgtccgtcctgttttgaattgcatcccgccgatattgatggatgtgattggcacctgcatttcgactaattccaatacttccattggattcgtgaatagatagaacactgattcatctgcatattttgggttattatagaccttcactgctttctccggagtcacgatattcactttgattcctggcggggctgcttgtttgaccaatgttttacgaatctcatcattagccacttctttactaacaacgatgatccgctttgcaccagcttcctttgcccatactgttgccacttgtccatgaatcaagcgatcatcgatccgcgataatttgatttgcatcttataaatcctcctcttcttcaatcacctgttgtttaaacgctttcactgtgtcgcaggatatttttgtaacatgattcacaatctctgttaaactgctgcctagcatacttgctgcctctaagacaatcggcagcgacattcctgatatcacgtcaatctcgcgttcaggattcttcattgcaactgcacagctggcattataaggcgtcccacaaaatagatctgtcaaaatcagatatgatgcatcttccttcattgccccagcaactttttcttggatcgtgtctaatccttcttctttcaaaaattcgatcgattcaaaatccggtagcgtaccaaaaatcatttctgctgattttttcatttcgtgtgccaacttcccatgcgcaaccaaaattaccttgttcataagctcctcccagttcttttttattttacaattctgccgaccgcttatttctcacgatcagcagaatcaaaaattaccctcgtgtttttccgccagcgacgttaacagtcacaccatctatgtagcttgaccggttagaaatgaagtaggcaactaagtctgctacttctcttaatttaccgtcacgacctaatggaattgtcttagtattcgtgtacccagcacgtaattgctcgactgttattccccgcgtataggctaacgctgtttcgtactcgatcgtacgtaagccggtttcttccataatcccaggagcaattccaacaacacggacacctttttttcctaactcctttgcccatgagcgagtaaagctgttcaccgctgcctttgttgccgcgtaaacactttgtccctccgaaccttctaagccacattctgatgacatattaatgatgaccccatagccttgcttgaccattacacgaccaactgcttggcccattaagtagacacccttttgattaatcgcgatcatcttattaaatatctgttcattaatttggaatttcccttcctcggacatcttctcgtcaactaacaaggctgggatattgatacccgcattattgacaactgcatcaattgtttgaaattttttcactgttgtcgctaccgtctgttccaccgattctggagaagtaacatctgtttgactaaaaactaaattttcgtgagtaaatgtcccttcgcgtaaatccgcattcaccacattgatctttaaatcacataactcttcaacgatagctgcaccaatccctgatgaacctccagtaacaatgaccgtttttccttgtacacctaaccaatccatagcaaatacccctttaacatttgtgatttacttttaacatttgttgcacttttatagtaaccgcactagaaaacgttgtcaataactttttgcaatttttttaaaacaaaatcacaaaagtgcaagacggcataagaaaacctcaggagaaaaccgctcctgaggactttttgtttagataaatcattttattgtcgatcactgattctaaattcgtatccaagtacgttcttatagtattctggatacatctctccaccacatttttcgcaatcaaattgcggagcgttctcaggatcaaatgcaacatctcctgcatccaaaaattgaactacttcctttggaattttttcctttatcccacattcaagacaaatgtaatgaaccactccattggaatcgaagttttttaaaagctgcttctttttctttttcatacttacgtttcgatgcttcttccccaatttttttattctcctctcgcatgaatcgttccgattctttattcttcgcatatttcactacaagtcgtccatttttagacacactaactccactaaattcataatattcgccacatctagtacattccaatggatttactccgaattcttcggctattcgttcacaccatgattttggtttaagtgctttcttcacattcacaagcattcgttgaatctctttctggtaattacttaatacttttttcatgattgtcttgatccgccgactataaatgccgtatctacgaattgttttgaactggttctctggaatatgacgaatcagtgcaccaataaattcctctgccgacatcgtctttatcttatccgtgttagttcgtttatcatgatactgaaacatcactattttcccatcgtacaaaaggatacgatttaaagcaatgggaccacgtttcatataacgactgatatattctaatatctttttgagagaagttcggctccttttgggtgcatgcacgtaaaaaccctctgcatttttcgtgtacgccgcttgtaaaagcggctggactcgtgccttatcccattgggataaggttcttcgaatgagctttaggaccgcattctgccaatatttcctcaacattgcgaacggaaaatagtcatagtccttccattttccatccttcgtcagtccacccatggtgacgactaaatgaacatgcggattgtattctagctgagaaccgaaggtgtggagtgttgccacaaccccagcttgtatatggtgctttctaaaaaaatctaatagtatccgtgcagcttcatccattaatccttttaaaagctccttacgatacttctccttcagaaaaatctcacgtaaaccttcatcgatcgtgaagatgacgtgtcgatgcgtcactgtaaacagatcattcgccgcaacctctgcccaccgttgactttccccagttgcacaagttggacaaaatttccctttacaacgaaaagccactttctttacatcatggcatccttcacagacaaatagacgataaccttttttaaggtcaccacaatcgcgaaacttcttcacttctcttttcacaacggatcgaatccttcttgtgtacctttgattgaatttctcccagttttgatattcatcaaagaaaatggcgtgtaaaatattgggtttcatatctccagtttaataggaaaaagaccagatgaaaagcggtcaaaagattgatgtatcaatcctttgaccgcttaaaatgttatacttcctttaatgttaaaaaaagacgagtttctccaactcgtctaaatagatactattcgtaaaccaattccataatcgtttcctgctgttcctcaggtatctcctcgtcgctcaaataatactcataagaaatcccgctgaatttcccgccaatttttttaatctcatccatcatggcgaaatagggctcagtcatatcatcataacgcccgacataaagtgcagataacgccttataggacggaaggaaataactgtcgctttcgatctccgcagcatttttgactttctctgccacgggaaaaccaacctccatctcaatggctgattcatccaatccgccattttcatccatatttttataagaaacaaatggtgtacttaatatttggattccttgctcttgaataaacccgcctagcttcataaaggttggtccaataacttgaggaatttcttcgaccttcacggtaaaggtttgagaaagaatccattgatctggtttcatgatttgttcaaacttcattgatatctcctcctttttctataagtgtatcgaataaaagtgccagaacatgtcatattaaaaatgatttttataaaatgccccaacgtaatttaaaaccttctcgcgaatccaatccgggccaagaatttcaacattttttcctagcggaattaaaaaacgatagagatcatcgaattccgtgaagttcaaagtcgcatcaaagctactgtcaggattgtccgtccaagcaaaatccgcgaactcggcatactttttataagcgatccgcttgctgaatcgtagccgaacagacaactgtggaaacaccaattcttcctctggaaacggatagtctattggctcttttaaaacaacgtttcgaatttgtttgagtggaaataagccccaatctagcttacttgattcccaagccagcaaataccacgtttgatacttgtacagtacacgttttggtgctaaagacaagagccgggtttggccatattcggtgtggtaaacacagttgatctcacaatgattgaataacgcctctttgattttttcaaaggtttggctggtgatctcggtctgactcaaatcgacctccagccattcgctccaatcatagaccgtgcccatttttttcagcagctcatccgtatcagctaagcctacagattgcaataaatgtaaagcaagaaatagatcatcctgctcttctttatcaatcaaagcattactgacatgataggcatcatccagaaaaataccgccatttcgccctttattggcatagactggaactcctgccaaactcagcgcatcgacatcacgataaaccgtccggaccgacacttggaatcgctccgctaattcctttgcggtaacttgcttgtggctcaataaaatcaagattgtttgaagcaaacgaataacctgcatagctcctccttaaaatagaaaaagataggactcccctatcttttcaatacttctcgcgcagtttcttccgtcgtgactaatacattaatatactgaccctttaatgcgctggcaatcgcgtcggctttatcgactgcttctgctacaccgattcgatacggtgttcgcttcaagtcagcgatatcgattccaatcagacgatcatctaaactattcttaatgtgttcgccttcaatattgtaaaagcgtgacaccacatctcccaccactttttttccttctaaataagccagcacatcttcgccatagaactgtttccagctttcactcgccttcaatgtcggcgaaccgattcctaaaatggcaatatcaatcttgcgccaataatcgatcaattcttgattaaaatcattttccatcaaggcttttttcaacgcgaccgtttcgggaaaagctggtgagtcaatcaataatgctcgaccatttagtttttttgatgcttcataggtaattgtattgacgtgataatcactgattaaacgcccagacggtccgccgatcattgggacacagagaatattatctaccgcataatttgtcagcccttctggtattgcggacatggtttcgccccaagaaaagccaaagatcatatcatccttaataatctctgttaggtattcaccgaccccttgtgctaacattttatccttttgcgtacgacttaaatctgttcccgcttgcactataattgccttttccagatcgaatttttcctgcaattccttttcgatactgtaggttcccgctttatcatagttgatggaaatattcacgattccttcgttacgagaacgcttcagcaaacgactgatcgtactgcgatgtatattcagctctttcgcgatttgactttgatttttatcttcttggtaatacatttcagcaatgcgaaccaataatttatcttcttctttttgcatagacttacctccttatcacatttgtgaaaaacatgagtcaatgtgattgtaccctttcttcgaccacacatgcaagccttttccctaaagacaaagaacccgtccattcagatatcgaatgaacgggatcaatttattccttcacactgcgaataatgtagtagcctttgtccttcgccactatttcggcgttgccgaaaacttcttccattttactttttgcgctgggcgcaccttgtttcttttggatcacgatggtcagtgtaccgccatcttttaacaacggttctgcatcgcttaatatctgatgaacgactttttttcctgcacggatcggcggattgctgacgattgcggcatattctttttgatgcaaggtttcatagatgttcgattgatgaatatctgcttcgatgccattgcgcttcgcatttccttgcgccagttccaccgcacgattattcacgtcgatcatttcgactgaacgcccagtctgataggccaatgccataccgattggaccatagccgcagccaacatccagcaatgttccctccggtaactcctccgcatcgaaatgctcgattaatacacgtgagccataatcaacggtgtccctagaaaagactccgctatccgtcacaaattgaaaattttttcccgccaattcaaacgaccattgatgcaagtcgtgtgccgtctcaggattttccgaataataatgatttgccatgttcttacccttctgctaataaaatttctttaatatcacgtgcaatcaaggcccctaagaaatgatagccctcgtctgacggatggatgccgtcgaatgtttgcacaaactcttttggttttggataaacagtcatgtggtgatacagatcgattacgttaacgcccgattctgccgctatcattttcgctttttgggcgaagagctgttgacgctcattgtctccctttgaataaatgtctgtattgatgtaacctgtcgtcaatagaatcacttttgacgcatcaaaggattcaatgatttctctaatattttcgccaaaggtgtcaagtgaatttgtctgcttcaacgaatcattggttccaaaagaaatgaccacaaaatcaccttctgcatccacggcttcactcacccgagccaaaccatcagaagaagtctcgccgcgcttgcctaacttgactaatgagtagccgggaaagcccatctccgtcagttcatcaagaatatacttatctaaaatatcactagtttcaccattcatgacaccagctaataaactgtctccgaataaaacgatttttttcatcatacacactccttctaacaattttcttccttatcatagcacgaaatgcggaaattatttaggcaaatagcgcgggccgaattcctgtcgtgcctttttactatatttctgcacaaaatccgatttcgcatccgtataggcatcacgattgtgctcaaacttttcctttaacgtaagctttaattcttcatattgccgcgcaacttctggatactttcgtagataatcccgaaaataaaactcatcccaatctcctatagcacgaacatgcagatgataaaccttttccgcaaagccttccgatgtgtagcccttattcaaatctaatgtttgtttctccttatcttcaatcatcaagatccaaccggcatttttcagcctagctgaagcttcttccacatcatacccatcaggaaattccaacaatatatctacaatcggcttagcaatcaagccttcgattgaagtactgccgatatgattgattcgttgaatcggaaaatcagcgaacaactccgttaactgctgcttttcttcctcgtaccatttctcataatccacgttatgatccttcaagataattggaaataattcccacaattccgccagcgtcatttcttccagtttcttcatttctccacctgctttcctaaatctcctgcttctatcatacactttttcaggttgtttcttggcttttcttaacatctccctagttttttccttcgcaactaaaaaaacaatgaaactcctatcattacgatagctttttacactttttttcggctaaaatggcttataacgttttgtgttaggaaattattcggatttcttggaaatagaacactttctaagactgtttttatggtagaataagcgcagttgccagttcagctttttacttgaaattgactggaatgcgcatgatattgaactcatttttcgattttgaaaaatgattactttaatatgaataaggatgccagttcaacttttcgcagtttactctgtttggcgttcattttagttattaaatcagtatattttggacacacttagttgaatggtatacggcatgaaaataggattcatttttcgctttttgaaaaatggttactttaatatgaataaggaggttcttatgaacgaaagagggaactatttccggatcgcccgcgaccagtggcaagatttctacacaccgggaaacacaccgttgacgcaagcagagcttgacaatatcaaaagcttgaatgaccaaatctcgatgaaggatgtggccgatgtttatgtacccttatgtcacctgatccatctttatatgaaggattttgagtcgctcacgttaagcaaagggttgtttctgcaccgttatgtgaagatgccgccgtttatcatcggaatcgctggaagtgttgccgtcggaaaaagtaccaccgctcgtttattacagaccttattagaccgccttttcaaacatcaaacggtccaattgatcaccactgacggctttttatatccaaacgctgtcttagaagaacgcgggattatggatcgcaaaggctttcccgaaagctatgatatggagaacctaattgatgtcttgaatgaagtaaaatcaggcaaagaaaatattcccatcccaaaatattcccatgatgtctacgatatcgtggatggagaatacgagctgatcgattcgccggatattttaatcgtcgaaggaatcaacaccttacaactgccagccaatcagcaaatctatgtcagtgactttttcgacctgtcgatctacgtcgatgctgatccgaaaatggtcgagcgttggtatatcgaacggttcgaatccttgctggacaccgcctttaaagatccggataactactattatgactacgcaatcggtgaccgcaaagaagcgcttgccatggcggaggatgtctggaaaaatgtcaacttgaagaatttggaagagtatatcttgccaacaagaggccgagctgatattatcttgcacaaggcaaagcatcatatcattgatgaaatctatttgcgtaaatactagcttataaagaaagcttgctttcttttataataaaacttgaaaaggggtaataattgtgacaaacgtttctgccgaaatgacaaacgtagaaaaaatcatcgtacttgattatggtagtcagtacaaccaattaatcactcgtcgtatccgtgaattcggtgttttctcagagcttttgagccaccgcatcactgctgaagaagtcaaagccatgaatccaaaagggatcattctttcaggcggcccaaatagtgtttatgacgaaggagccttctccattgatccaaaaatctttgaattagggattccaattttaggaatctgttacggcatgcagctgatcacatataacctaggcggaaaagttgaacccgctaaaaaccgtgaatacgggcaagcaacgttagaaattgtttctgataatgccgtcctattcgctgatacaccaaaagaacaaaccgtttggatgagccacggcgacttagtcactcaagtaccagaaggatttgaaaaagtcggcaccagcaaagactgcccaatcgcagcgatccaagatacaaaccgtaacttcttcggcatccaattccacgcagaagtacgtcattcagaatacggcaatgaactattacgtcactttgccctagatgtttgccaatgtaaaggtgattggacgatggataacttcatcgacatgcaggtcgcaaaaatccgcgaacaagtcggcgacaaaaaagtcctacttggcctatcaggtggtgtggactcatctgtcgtaggggtgcttttacaaaaagctatcggtgaccaattaacatcgatcttcgtagaccacggtctattacgtaaaaacgaaggcgaacaagtcatggaagcacttggcggaaaattcggcttgaacatcatcaaagttgatgctaaagatcgtttcctagataaattagctggtgtttctgatccagagaaaaaacgcaaaatcatcggaaacgaattcgtttacctattcgacgatgaagcaactaaacttgctggtcaagaaggcatttccttcttagcccaaggaacactttatacagacgtcatcgaatctggtaccgaaacagcacaaacaatcaaatctcaccataacgttggtggattaccagaagacatgcagttcgaattgatcgaaccactgaataccctattcaaagacgaagtccgcgaattaggaacacagcttggcatgcctgactcaatcgtatggcgccaaccattcccaggaccaggtctaggtatccgcgtccttggtgaaatcactgaagaaaaactagaaatcgtccgcgaatcagacgcgatcctccgagaagaaattgccaacgccggtctggaccgcgacatctggcaatacttcactgtcctaccaggcatccgctcagtcggtgttatgggcgatggccgtacctacgactacacagtcggtatccgtgcggttacctcaattgatggtatgaccgcagacttcgcacgtatcccatgggatgtcttgcaaaagatttctgttcgaatcgtgaatgaagttgctcatgtgaatcggattgtgtatgatattacgtctaagccacctgctactgtggagtgggaatagtgtgaaaaaaggttctataatatttggtgttgttactctttctgagtgagaacaccaagtatttttttatacaaaaagacatttggttgtcctataattaaatcgctgaacccaatcataggaggcgaaccaaatgtccagtattaagaatatcaaatataaagataattgcctagacaaaaccatcaaacaaatcctaaatattcatgattccaacattacttttcctaaagacgccgtttcaaaagaaaaagtccatgacagaatggccaccgtctttactggtcgactgagctatccgtctcctcggtgtgagtgttgcggctacgactccgtcatccatcatggctacaaagatagctggattcaattactcccttatcaagaggtgtctacctatcttcatctctataaacaacggttttattgtaaacagtgtcaccataccttttcagctaaaacctattatgtcgcagaaaactgttatctctcccaagcgctcaagtttgcgatcgctgttgatttaaagaagaaaatttcgatgaaagatatcgctcaacgttacttggtttccgctaaaacggtcgaacgggtcttggattctttttttgaagaaccacgactgaagcccaattacttacccaaacatctattgattgatgaattcaaaggaactaaggactgtcagggcgccatgtgttttattctcagtgacgcggacacggggaaaatctttgatattttagaggatcgaagaagcttcaagctgatcgcctatttcatgcgttttacttatcacgcacggaaaaacgtttctcatgtcgtgatggatatgaatgcgggctatgattctgtgacaaaggtcgttttcccaaatgctcggatttccattgatcgatttcatgtgatccaacaactcaatcgtgcgtttaacaaacaacggataaaaaccatgaatcacttgaaaaagagcgacccgcaagccatgaaaaagtatcgcaagcttaagaaatattggcgaaccattctgaaaaaaaatagaaaaattaattattcttcgctcaaacaatacccgcttttccaacggaaatacctgacggaatcggaagtattggattatttattatcgattgacgagcgcttacggacaagctatgatgtgtatcaaaatttgttggatgcctttgatgccaaagattataaggacttttacgaacgcattgatcacttacctccgatgcttgatccagcatttaaaaaagcgattctttacttaaacaaacacaaacaagcgattatcaatgcgttaaaatacccctattcgaacggaaaacttgaagggaagaataacttgattaaagtgattaagagagtggcattcggttttagaacctttcgccaccttcgtatgcgaattctgattcaacagaatctttgcgacattatttgagcaaaaaaacaaaaagaaaaaaggaaacgccgaagcatttcctttcagtgatttaatgagaacaacacgatttgacttagagcctgaaaaaagagctcaactccttgcattataaggagttgagctcttttctgaagtaattactaaatcacatacataagattgtaagttcatacacttagatacccaagaaaaattggactagttacttcctgtttaatacataaaaactagcatagaatatacgctaatttactcttcttctaccgttattatcgttatctttaaaagtacatatctttacaattatccataccagataaaatacatcccaagaaacaatagtaaatagaaagaaccagaaaaatagacccatacttttaacaaacgagggcatatttggaatgacaaaacagtaaaatattgagagtaaaactaaaacaatattgtataaaaaggcgtttcttagtctttcaagtaatgtattataaatatttgaatccaaatcaaatttcttagctcttctgaaaaaaatagaatcttctttcaaactcattaataatccaatcaataatccaagaatacctaggattattgatgaaaaggatatcgtatcactaatagctcctcgaatgctcaacatataaccgtttttgtatataaagactagaaaaagacaaataaaaattattaaaacatacctaaaataatctactttatcaactaaatcccccttttttaaaactttccttgctttttctaatttcatattatcaccctgttattctttatcttggcaacaaacgaattaatttattttgcatagatattccagctgcaaagtaattttgctccttaaatccattgaaaatgtactcggcaccaattgtagatcgattttgtacttctagtactatctctgaactaagctttggtgtcaataaatcaatatattccatcgaactttctatatctcttctcgaggttacatgcataccaacatccaaatctttttccctagtcaatttcaaaacatctcgaatcattcgacgtacttcctcagaatctaaactttcgctcttacctgtttttgccatcgaaagagttacttcaaaatttactccatgaacttctgatagtgctgcaattgatctgcttaaaacatctgaatccaattcttcatcagctatttcattaaaatctgctccttttattgtaatttttcgatatatctcattttgcattaccttttcaatagcattactatcaataatcggtgctaagtttacaacgtaaggaacatctccgtctctctcatgattcaaatcatttactctcattcgcaatccgcttaatgttaaagcgatttgtttaacattaagaccataaaaattcccttgagtaactaatacatttgtacgaggatcataaattaataagttgaattctcctaaatattcgtcatcagctaagtttatatcctctttatcttgattaattttctttcttgaaggaatatttttagatctaagctttgataactgcagataatacaaattatttgcataatcataaccacaactattccattctaaatcagatacttcatcgcctaaaaaaacagaggcattaaaggacctcttattattcagtattgcatctaaaaactttttcatatcccatgtcactaactcattgttctcaactattaattgtggttcaaaataattaaaacgaattttttgttttgccatctcagtgtactcctttttattaacgtctacaataattattaaaacaaaacataagtgaaaaaacaaatgtttttataactttcgctaagtgcaaataacaaaaatagttataggttttaatagctttttgcgaacgtgtgtaagatatttgattatcgcctttattggtatagtatctatcattacaaaccgaaaaagtcattaactcagacgttgtatgtcttaaatcaaaaactattaactacacctctaatttcaaataattgcactacgatcaagactacttcttatattgggttccttaacaatactgctgaaattgttgaaacagcaatctccttaaaatgattagattctcgaaatagctttctcatcaaatagctaaactttttattaatagaaaaaatcaattttatttcataagtaactaatcgtaaacttattgcttcattactatctgatatagattatttaattgctctttgaaataattgagtctcaaattgacaattaaattcttttattaattcagctgatccgtttataaaaaacaaattcattgtcgattgtctttgctaagttattatttcatcccaaaaaaatattaccacaaccgaaaatatactactccaaactgattatatgaatttctcactaagcaccaccttatgattttggaatggcctttttctctgggatgctcttctttacacaatgctttccttttcaaccaatatgctatagtacccgaaaggagcattacaatgggagtaattattattaaagcctagcaaaagcttggcaggaatgcttgaagagcttttgctgaatcctaaattctactttattaggagggtaaaagatggcttatcagaacgcattcgaacttctaccagaggaaatcgtaaaagagatccaaaaatatgtgaatagtacaatcctttatatccccaagaggtcaacagagcgtttgccttggggcagcaagactgctagtaaagagttgcttcgacaaaggaatcaacagatctatcaggagtatcagctcgggaaaagtactcgcgagctcgctggcagctattacatggatatcaaaagtatccaacgtatcattcgcacaatcaaaaaacaatgttaagaaagagcgaattccggctctttctttttttataaaaaaactcgttcctccgcctatgcatcgctcctttatactaaagatagaacaacgaaaggatttgatttctatgaaattaattgctgactgctaactgcaatttttgctgaaaggaggagcattcatgacacagcctaaggcgaagctggaggattttcttcatcagaagaaaaagaaaacctttgaacactcgcagcaacaatctaaaaataaagtgaagggcaaacaaaacgcccatccggttcaaaatagacgtggtcgtccattatcgaaataattgacatgaagtcctcattggaaaatgaccacataaaaaaataagaacctaaacaccgaattatatccagtgtttaggttcttatttctcgtttagtttgattaatttttcatccaaaaaagatcattaactcaatagctataagtattccgatcaacaacgctaaccccaacggatgataaggattgatcgcccagccgacaccaaatgatttcggaatgattatcggggcgtattttccactgactttatcgtctttgggaataattaaaaagaagcgcaggatcgtaaaaagaaacacgattcctacaacaagcatcggcaatatcctttggttcgcaagctccggtatccggctcatcacaaaagaaaaaaataccgtcagcaacaaaatcaccacaaaggctgcgtcaaaaatttttcttcgcttggttcgtttgatgagctctgcgtctttcttcattttatccattaattgttcatcacctttcaacaattcgtctaaggagatttggtagtaatcgctaattgaaatgatcatcggaatatctggaaaattccgtccgacttcccaattggagattgtttgtcgtgagacgtgcagatgatctgccacctcctgttgagtcaatcccattgactgccgttgtttttttaatttttcgcctagcaatacttcatccccctaaatcaaaattacctgttgataagacaacttacaagcaagataccaaagcactctgaaaaagacaagctcgaatgacaagcatcgtgattatatcaatgtttccagctattcaaatgatcgaatcttttcataagaattatatcgttaaaggcaatcaaaacacacccttaattcgaaatctagacaaaaaagtggtcgcaaatgaatctgcaaccacttcctattaatgtttttttcaaatcagctttctactcttcgccgaccgttcttctgttttatttttcaaacttcatggtaataccgtttggatcgacgacggtcaaactgccgctttcgtctttggaataattgatctgatttttccaatgttcttctaaacgatccaactctgcttgattgggtacgacgaagctaaaataatccaagcctaaatcctgttcagacatggcaggaatatttttccctaaccagatgttggacccgatatggtgatgataatcccccgtcgcaaaaaatttggcttgattgccaaaattattcttcaaggatagccctaaaacttctgtataaaatttttccgtctgtatcagatccgctacttttaaatgcacatgaccaaccgtcgttcctgctggaaatccttcccctgcaccatcgctcgcggcgatgaccgcttcggcatccatctcgatagtcacaccaacaatctcaccatcggcacgaacatcccattcactttgcggcttgtcacggtagacttcgattccattaccttcgggatcatttaaataaatggcttcgctatagccgtgatcactagcaccaatcaaaggcgcctcgatcgtcaaatagtgacgcagcgcatttcctaaatcttttcgagtcggtaataaaaaagctacatgatataaaccggtttttggtgtcaaaggcagcggctcttgcaccttatgtaattctagtagtaccgtattatcaacacctaaagtactttgaattgcgctttgttctaagacctgcagcccaatcacttcttggtaaaaacgggtcattttttctaaatttgctactttcaatgccacgcggcccatgtgtgcggtggcacttaattgaaatgtgggaataatcactgtcatggttaaaacctcctgtaaggaacaacgccagcgagtgtcgttattcgtttcttgagattaccttaacgtcttactaatagtaagtaaaatcctatgcttaacttcccctcaatattaactagagcattcgtaaaaaggcagacagtcttctataatgaatgaaagaaacgaaaccagtcaagttccgagttgtttcagcggaatgacctacgacataaaaggagcaagaaaacatggcggactcaacggaacaaaactacctgcggttaattaataaaactgaagactacatcgaacagcatctcgcggagccaatctctttgagtgatctagccaaaaacgcgcatttttcagaatttcatttccatcgaatgtttaaaaaatattcatcggagacattaaaggaatttgtgactagatttaagctagaacgtgcggctatttttctatgtattgcttcttctatttcattaaccgacattgccttaagctacggctataacgatgcgagttccttcagcagagccttcaaaaaacattttggcgtcagcccttccagctatcggaaacagcaagaaatgacaagagcttctgatagaaacatggaataatgaagttattcgaaaaggaggacatgaaaatgatcgaaccaaaaagcattaccatagaaaatttagagaacttgaacatcatctacattcgtttcagaggaagctatgccgcctttagaaaacagagccgcaaaatgttcaacgaactatttgagtttgcgacaaagaatgaactcattatcgaaaatgagaccaaggtattaaccatttacgatgacaatccatttattactgacgcgaaaaatttacgtacaagcgttgccatgacgattccaaatgatcggccccttcaggaaaccggcaatatttgtttatcaagtatttcaggaaaattcggtgttggacattttgaactatccacgaaggaatatggggatgcgtggcagtatatgtatcaagaatggctgtttaaggatgaacgaaaagttcgcgatgccgttccgtttgaattgtacgtaactgaaccgcctagaaattcaaaggaaaaaagtttgacggatatttatattccgataaattgaaaaatagaaaaaacgaggttgtttagattttctatgaggaaaaagcaggaccaagtgctcagatagtcattctgagcgcttagttatttcgttgatagttcacgctactggatacataagaattcatagaattcacttgttacttgatatcctttgccccacattgtttgaatgattgtttctggaatatttcgaatctgtaatttctttcggattttctttattaacacggataaagaagataacttagattgcgttgttcctccttgccacaaatgttcgcagatctcatcccgagaagcaattttcccttctgtaaaataaaggtatttaagtaacttatgctccattgctgatagattcaattctgaaattgttcgttttatttttacatgatttgtctcgtttaatggagataattggttcatttgattgaatgtcttattggctaagtatttctttgtaatgacttctctaatcacttccaacgaatgagatgtaattagcccatccacttcatgattcatccagaactcttcaacttctagggtttgttctgtatcaaattttcgtaaaatcgggcgcttcatttttttcaaattctctaaagtttccatagcctcttgatctgataacgtattgcttaatataaccaaatcaaaattgcttatccgtgttcctttttttaacaacgtcagtaagtgagcagaacaatagacttcatggctcaagatttgaagtctatgttgaatatcgtattcagctaatatgtttttggttaaaattagaatttgcattcctttatttctctccttctatagttacttaacaaagctactttattaatcaaaacttcttctttttttgatgaggatgttaacaaaattaaaccaatcaatcgcgcgaggcggctccagccaatagataactaacgtgctattcaatttactattgtctaaattattggaatctgttagcagcacatcagtatttttcattaacgtcggttgaaaatcgaggttcaagtggctgcaaatatttttaatgcttctttttatgaaaaggttgtattcttcaccaaaagagaaatcaatcgtgatattgatggcactctgaagcatttccggtgacaaacaattcacgagcattaatagatagtgatagtataaatagactgcatgctcttgaacaaataggttctttgctttcttttgagtagcaataaagctccggcaaaaatcaaaaacgacttgataattttcttgaaaatatgacaaatcaaaaatattttcaaaaagcaggacctttccactgaatatcgcgttgaaatgaattcgggccattctattcgtgatttccttttttaaagaagaagtataaatttgtggaaaggactgaaatagcttttctataaaaagctcaatgagatcactttgtatttcttcatttactaattcttccgccgcctgctcaggcaaagcttcattcaatatcaaaattcctatgaactcattcagctcattttcttgacagagttttttattccgttcgcaagtaaaagctgttttaattctttaaacgtttctgatttcatcagcttctcttttattcttctagataattttctagtacttttatccgaagaaagagcaattagcacataattaatgattctatttttatgtgaagggcgcattggtttatagtttctttcaataatatctacaatgtgggtcgctcttatgagcatttgttcgctaaatagtgaccccgcaagatccgtccgatgcaaaagatttacacctagcagtcgaaccgtgcgttcgttaccagcgatcgagtaactgcccttcttttttactaattccaaatctagtggttttagcgattcttgtactttgtctagccacttgtagacaatcgagttgctggtgaaatgggtactcgcaaaatcaggtgccgaatcaaattttcccattaaaatctgtaagagcatctttacccctatagatttttgaaggtacttttttagaaaaaaattggatgtcacaccgcccaattcctctatagaaataatgctatcgtcttcagtaattttgaattcttctgtaatcccaaattcacagcaatcttcttgaagtctatcaatcgttactcgcaataaatattctgacaatttgaactcgtctttgatgaaagattttgactttgataaaaatgggtccatctccaataatttaattaggtggtattttctaaggtctttcttttcaatcaattgttcaatcactcttaattgctcctccaaataataaaacagccagttgcatccccacttaaaagggtcctttttgtccaaatagtacagttcccgataacatataagccatttggctcagcgtccctatattttcttttccatcaccactaggaacaggaaatttattgattggataatcaaaaaaatggtcgttcgtagctaatattccttttctttttgggataaccacggctgaatcactctcttttgctttttcaagcatcgtgcctacaggtttattttttctagcttttctttcttccctcttaactttttcaggaacaatctcttcggccggtttttgcgagttaaaaattggattactgactgcttcagaaatactgcctattgaaaaagacattgctactaatgaactgaatagtactggtatgtaatattttttcatctcaatccttctttctgcctgtcatcatccaaataaaccaagagaaaagaatcaataaaaatatcaacccaatactagaaagaattaattgatttgagggcacttttggcttgcctagatatcgcttgttcatcgttttatcactttgattaatagaattttttgcattgactaaacaagccttcacacaaattcgattgctcgttgcatttgtactgtcgcaagtaagtagtgttagttcaggtttcttcgtttcctgcataacctgaatgtctcgttcatcaattacttttttctctactattttgtactcatagtttttccccagataatgcaagaatacggagtcctctactttcacctgattcaacgaaccaaacaaaaaattttgactgccaacatagtgccctaaaatgactaaattatttttggatggctctcgttcaggaaatatggtacccgcaccgattaagagctcttcgttttttagacctgaaaaaactggtaaaaaaatatcagcagcgggtacctcaatagttcctatgccagtagtttttgggaccttcgctgctaaaaaactggacagctgcaaaggctggatctcttcgactactggttgtggggtattggctaaatttgaagtgatcgttatctctgtgttctgatgataaagaagcaaccactcttttattttgtctactcccatcaaagcaatagcaaccagcaatgctcctatcaacatagttctgagaactagtctattcatccgtttttttcttatcctttctgcgaatcaatagcaatatcgtgaggataagcagtaaaataatcgctcctaataggtaataaagccatgtatagttcggagcagcgtctaagacatcaacatcttttttattgtaggtttgtgcagctttttgagtaatggtgaatttcttttcaaattcccatttctgttgataattctgtggtttcccttcgttgtccttcccgaaagtaaattccccatttttatcttttattccgtaagcagttcctttataaaggtattcaccagcttctagttcttctccctgtaaaggaatgttgtaccagaatccagaatttggtgccatctgcatattttctgttttctctgaataaactttttttccgtctttttccttatagattgccgcatcaatggctaagttgtttatgtaaaacggcttatcattgctgaagtatccacgaataacattcctaacattccgttgattggcttcggccttttgtagggtcaattctcctgttccagagattccctctgattgtcgcatcaatacagccactgcaaaattaaatttatttttgatggccatgccttcggaatcctttttctctttttcatcgctatcaacttcttggaatgaaattcctccggcaataatcccaggaaattcttcttgaggcatttttacagtaaaggaatagcgttcttttgatttaggtgctaaggtgactactttcttatagtcgactaatttttcgagatcatgcttttgtgaggcatgtagtggtaaatcattaggcgaatattctactaccccattatcattcgtcttggcgctagtcattccaacatttatttttacttctttatcggtagcatttgatagatcaacttctagtttttgtgttcctcccggttcaagaagaatatcgtagtaacccaattgcccttttcgttggctctccggcaaaatcggatcgacattaaacgcaaactcagaagcttgagcagctcttaacgggaagaaaatacttaacgtaactaaaataagtgatagtacactatattttttcatgagacttcctttcaaattcaaaaataatatttttaggctttactgccagggcgcgctaacaagtatccactgaaaattggttgtatagttggtgccatatttgattgttcgacctggaacagataagtaaatacttttttctccttcttcagcatctttcccccaaacaaattgaaatgaaccttcaccagtaccttctttggcctgcatcacgtttacagactcattgggaaagagcacaaaacgctctttcccatcaggcaattctgaagttgaatttgtgacagctcttccatgttcaaatgaaatacttgcaccatctaagatacggccttcagaatctgaaaattgattttcttgcttcagctctaaattccaaccagtataagtttgtcggttatcagtaatttggatgaaattgggccctttttccaatttacctgttgctttcacacgaaaaggctgtaaaaatgcgaaatattctttgtcgattgtttgaattgattgctgtccaaaataaaactcggaaacataatcaatttgtagctttctcggctgattctttgtgtagaaaaaacgaatatcgcctttactagtggtttgcccattgacttccagggaataagcaaatactagacacaaacaaacaatccacaagatttttttcacagattctcctccttattcgttttaatgaattaatttttcatggaaaaattagttctattcgaatgccgtatatcattcaactaaagtattcagtccatttatgaaacatttttgcctattacttctctagccatatctcctgctaaaagttgaactgacatccttattcgttttaatgaattaatttttcacggaaaaattagttctattcgaatgccatatatcattcaactaaagtattcagtccatttatgaaacatatttgcctgatacttctctagctatatctcctgctaaaagttgaactgacatccttattcgttttaatgaattaatttttcacggaaaaattagttctattcgaatgccatatatcattcaactaaagtattcagtccatttatgaaacatttttgcctaatacttctctagctatatctcctgctaaaagttgaactgactctaataaagatgtgtaaatttgaatcaaattctcttattatcgtcgacatacgattccactaacgtattaaaaatacgtagtggaactcgcaactgacatccttattcgttttaatgacaagtattaatcaatcgggctgcttgttaatgtccaaaccaaatttgtcgaatagttaacagcttcttttggtgtttttccaggcagagaaagttccaccgacttgattacaggtatttctttcactttatcttcttgatctttctcttctacccattcgacagttccccagcggtttacccatgtaccaatcccagcattttcgctcgcctgcatgactacatttgaacgattatcgccttctaaataaatttgaggattaagcactggagccggactatcagatacactagcactttccggatttttcaaagtgattcttgcacccgttaacgtgtgatacttcactgccttctccgcatgaaactgattggtttgtctaactaataattgccagccagtatactcacctctcgtatctgtcacctgcacataatttgggcttaaatattccgtgtcaacgtaacgttgcgctctagcgtaatatgttcgatctttattcgtgatttcttgctcaccaaagtctaagctggaaacgaaatcgactgacagcggcccgggcgttcctggctttggaccattgggattagttggatcaattggacgtatcggcttattcgggtcgggatcatttggatcaacgggtggtgtaatttcattccctgatgtaaagcctacatcaccctcacttggataaaattgttcttgcgcatgtgcagctgtttgaattgaggcaaaaatcgataaacttgctgcggtaatgataaactttgttactgctctcatattttgcctcctattaaattaaggttttgccactaatttccaagttaggctagtcgtgtatttcccaacttctgcattggcagtccctggtactgttaatctaaccgcatcggctgcatccgttgcattttcgccaaaatggaaagcccaagttcctttaccttgtcctgcagcggcagaggcaatactatgctcgtcaccaggatttagatctactttagtggaagttgtaggagcagcagatccgctgatacttttagctttgatcttattcaacgtcatagctgcacctgttaaatcagtcgttccttttttaaattgtgattcttgtttaacggttaagtcccaacctgtataaagaccagttttatccgttacttgcacatagttagggccatcagcaggggttccatttttgtacttttgcaatgcggcattataagtatgtgtttgagttgagattttttgtgtaccaaagtcaaagcttgatgcatagtcaattgacaatggtccaggggtaccaggctctgggccatttggatcagttggatcaactggatcaaccggcttgtttggatctggatcaactggatcaactgggggagttggagtatcgtccttttcaaaattcacgacaccattcgatgaatacgtagctgcatccactgatagactgcctaatacagctgagcttaataaaagtcctgttaataaaattgtaatttttttcatgttttcctcctgagattataaaaattttttatgtttatatgactaacttcgctccttaattaaggcgctgtaggagcttgctccaatgtccaagtcatggttgtttggtacgttgttttttcagctaaggctgtttttggcacatgtaaatttgcattatgattaaaggtccattgacctcttccttcatttttagcagcttgcacgattatttgatcttgattgaaattcgcaaatttgattgttggattgattttagaaggtgctgtcacacctgttactccaactggggttcctacgtcagtcaatgataaagttgcccctgacaaatctttcccatttcccccatttcctttaaattgggcattttgcttaactgacaaactccagcctgaataaatacccgttaggtctacgactgaaaatgtatgtccagtgctcttataatcttgatcagtcaaactaattgatttttgcccaaaatctaacttggatacatgatcaatgtaaagatcatctccattagatccggctccttgaataaattcgatttttccagttgcttcttcagcatttgctgaaatagcacctgtagagatagaccctaagattagtgccaataccaataattttgttttcttcatgcttgcactcctttttttcgttcttttactatcatgcatccgatcattcctaaaatcagtgtgccgaaaattttagctcttacatagctagaatcccctaattgtggaatagtatcgggtaaagaagacgtgcttgctccacgatcaacatagtcgttcccattaccagatgtccctggtaattcttttttgtctttcggattagctgattcttcctcaaacttatattctccatataacgttacactgccattactgctatattcttgtttttcttctgcataagcacctaggcttgttgaatgaaagaaaaaagaaatcattaagcaactgatcaatagccatttaggttttttcttaacttgcatctctcaaacctccagtctatggtgctaaagcatacgtccaggttagctcacctgtatagacgcctttgtattgcttactaaacggtattttcatcatcaagcccttagtgtctgtccaactgctgctgatattcaaaatagtatcagtcgtaaatgtatccgattcaacaactgaagcattttgattaatttgagcatccgaatagtacaacgtatctgctagtgatttacgatcaccgtccccttctaattgaatcggtttgctttgagctaaagaaagcgtccattttgatttttgataacgcgtatccttaatactcaaatcagtttgtgtactgccatctgcttcgtatcctttaggttttgtcgcattgatttctttttgctgaatggggtatgagccaaagttaaaaatctttggaaccgtcattttaaattcaccctttggcttatacaagagcgtaaattctgcaccagctgaggtcatttcatgttcggtttcatctgaatcgccaccctcaagtcccgtataaacatagtcttgataatcggatgtcgcttttttgtaatcgatcaaacgaaattttttcccaattggcattgagattgtttccgtctcaacacttttagagtcagctttcttatgatgaaggactagatttgcagcaggcggatcctctactgttaccgagacattatttgacgtgtaatctacctctaaggcatcgggattggtcagatgaaaattcgtgttcaatgacttcccgattgctgcgccctcgcttaccttcgcattgaaggcaatcacatactccttcagcagatcgttgctcgtgttttccagattcaaattaggaaatttaagcttttgaccactaatttcgtaaagcgtttcaggaatctcagtaccattcaatctcagattcaacttgtcatcaaaatcgagaccatatggtaaagtcgtttcaatggtgacattcttagaaccaaaggaatttttcttgattttaatggaatccttgatttctaacttatccccacgctgcgcagtcacatccgtaccaacagatgaattttgcgtgacattttgaattgttgcttcttgacttttgattgctgttggcatttcgcggatcatcaaggcattggtttgtgccaacgaccctgttgaaccagtaaagccgaagtaaacttccttcgaaccaccaaatgtcgatagcatttcttgttcatccttgaaggtgtagctgattggcggaatgccgtcatctacatcattttcttcacggatcattaacgtacgactagccgcatgccaagcaaccaccattgaacgccagcctggaaggagcctattatcgtaatacgtcccaccaaatgacagccaaaaattagaattcgttactgcgagatgccccttgggtgttgtttcagcaggtttgacaactccgatatgtccatatcgacgatcagtagctgaaaggccggaatcctggtcatcgttataaaacgtatcgtactcaactgagatggcattgcgaacataatttcttcccgcactaccgacgccataagcacctaacgccttcccgccagaaccgatcacgcttgtttcatcagcagttccaattcgcggatcatttgtaaaagtgaaggtcatcccatcacctgttcccatttcactagaagggcttgtagtttttcttttctttaagcctaagtaaatatcaaatcgaaaggcaaaatcatacgacagatcgattttattcttggaccagacagcacccagctgacttttctgatccttcgtaatcgtcagcaccttaccattctcatatacctgcggcggcagtcctgaacttgagatacctggtcgaaaaacattcgaaatgtttacaccgctttcgtatccattcggattgtgataatctccaagctctccccaactagggtgaacatttgaaggattatccgctgtgcctaccaaaaagggcctaactagcgtccttttattctttgccggaccataactactagtcacagtctcctctttctcagaagtaggtaactcttccgattccgatgtacgaacaatttcagcgtcttcgtcacttttatcgctttctttaacggattccttcggttcttctggatcttctgacgattctgaactactttcattactagagctttcaatgattcgctcagaagtttccgcactgacaagcgaaacttgggatagggcaatgaaagttaggatgaaaaatactgtaagctttctcagtctctgcatttgcatcctcctctctttataaaataactgttctcttttatatccttagacctcctttctgtaatgacaataacagaaattgatttcttcatttttcttttttttttttgtaaattaaaaaaaaaacaaaggaaggtctttttaaatcaacttatttcgaaataaaatttaagaaatatgtttatagacatacatataaccgcttacataagatatcataatattgcttttaaaaattaataataacattttccgctttgtaaaacatgttaatatcatggtaattaagcagaattatgccttattttctaatcatttaatcatttataaaaagaacaaatccaaaaatatacttattagaaatttgtttccctatacatgaattatctatatgtataattcgtcaaatatattattaataaaagggttaggactttttccaaaaagtttgcttcaagttggaaaaacaattatgtttcaactttgctatagaacacctctaatttacagaaaatataaacaattattttttgtatattattttatttattttcgttatgattttattgcttagctattccccatccttaagaaaaaagaaaaggaattttctatatatcaagcattaactatagattaaattacagagcaactttaggtgtaaatctgaacttacttcttgttattaacaaaataagaaaacatccttttaagggatataagaatcaaaaaggaactctaagaataactaatagaaacacgagaagaacaaatacttcctacaaaaaaagaaaacgtttactgaaaatgacggctgccattatttttatccatcactaattactctaccgagccgcttgacttgctcatttttcacctttcttttaaacttatcaaaagtaagcaaaaaagaaggggattttatgccagcatttcatcatatttcattattaaccaaagacagtcatgaaaatgtccatttttatacagaaattctagggatgcgctttgttaaaaatacagtcaatcaagataatcatcggatgcttcattactactacggcgattatcaaggagcgcccggcagtgtcgtgaccttttttattatccctagcctaggacatcgctacgaaaatcaaaacttcatttccacaataggtctgaagcttccgcaaactagcatggcttattggcaagaacggttgaacaaatattctatcgactattctgtaaatgatcgccaaattcacttttttgaccccgatcaggtagaaatcatcttaactgagacggatttaccgccattggcgatggatcatcaagtcaacaatgacgttccagcagataaacaaatcataggattgcattctagtcagctccacgttagcgatcctcaagcgactagtgcttttttcgagacgtttcttgggtgggcaacagttaatcagcgaattcaattgaacgcgacggattttctcgaaatcttgcctactgaagctaacaagcctagtcacatgggacgaggcagtgcagatcatatcgcttttgcggttgttgatgataccgccttaaatgagttgtatcaacgagcagaaaaacaaggctggcagatcgaaaagctagtttcccgtggttactttaaaagcctttacattcgtgagcctggcggaaatcgtatagagtttgcgactttgacccctggttttacacttgatgagccactggaaaaattaggagaaagtctagctttaccaccatttttagcgaaacagcgtgatgaaattgaagccaatatttatccagaaagatgatcagaagaagcgtgaatcacgaatttccgttgatttcacgctctttttcctatttttacctaaaatggaaaggctgttctgctagaccatcctgtcaggctccctctagataggatttacttcaatagttattcattcctgtagcttgataatcttctgctcataatttgatcttattatttgataaatattcgtttcaaaaaatcgatttaatcacatccgttattattctagccgtaaacattaacgccagcaacgcgctatatcacgagcttttttatagaaaacggctatttataagactttaagtcagtaaatacacaaaatcccaaatttttaataaaaatgaaaaattttgtttaaaaaaagaattactagcctctcaaacttttaaaaataacgattattatccaaagaacagataacggacaacacaaatagctatgatacatcaaaaaaaagaccaactcattcatgagtcagtctccaattaaaaacacttattcattcataaaaatgacagaccattccccacgcttacttaaaaattctttcgctaagtcctgtgcaccttccaacgtatggttcgctgcccagccgcattgcactggattgcttgcgggaacttcggtagccgttaacacgtcttgcattgtcaacgctactacgtccatgatttcatcgatattgtcgtgattcaaaacggttaaataaaaacctgtttggcagcccattggcgaccagtccacgatgtaatctgcgtggttacgaattagctctgccgttaaatgctctaacgaatgtagcgccgccatatccatataggcttgatttggctgttttaggcggacatcgtatttgacgatcaaatcaccattcgctccggtcttcttatctgccacccgaatatagggcgcctttacctttgtgtgatccaaattgaagctctcaacattcattttcatttattctgcctccattattttttctgcgataactaaccaaacaaagcgattcatttgtttataccttgtttggaagccattcattcggaatagttcttccagctcactcattaaggaatagtattcccgttcgagatcagctgctaagttggctcgtcctgctgctttttctacttccaagatttccgtatacgtcttctgcgataggaacatcgtatctccaaaaacgatctttccgccagtagttaatagctgactgtagcgttggatcgctcgcgccttttcctctgtggtcaaatggtgaaagaccagatttgaagcgatcgtatctattggttcattgggtacagggaatttttccatatcgccagcgaaaaaggtggtctcgtgtaacgctggtttttccgctgcgatatttcgcatttccggtgatggctcgactggataaacggtcttgccagcaacgactagtttttcggttaaattgcctgttccactaccgaactctaatactacctcccccgaagcagcattgatttcatccagtatctgccagtaattagcgaaaacttcctgatattcaggatttccgccattcacctcatcgtcgtagaccactgcccactcctcaaagatcggcataaactccaatcccatgttgttaacctctctctatttttatttctatcactcactttttaggctctatcagtcacacctccaaagcccttttgcttttcctttctgtcatgtaatactcctgcgccagcagcaagtttcctttctgttgttttcacgcatttttttgccaactcataatagccatgacttggcaaattagactactggataatccttaataagcttctctcaaataaatctcctttgatagataacgatctcctgcatcgggaaaaatcgtcaccacttgacttcccgcaggcaagctagcaacctctgccaaggcccctaccatcgcggctcccgatgagctgccaatcaaaattccatgctccttcgctagctttcgggtcatcgcaaagccttcgtcatcactaatcgtagcaaagcagctgatcggtaactcgtttagaaatgtcggaataaactcaacaccgatcccttcaatctcatgcccatgactatctccaccgttcaggatcgagccttcaggttccacaccaatcaagcgaatcgcggaatttcgttctaatagataccgcgccaccccgctaaaggtcccgccactaccgattcctgctacaaagctggtgataccttctccaagatcctcaaccaattccggtgccaacgagcgataatacgcttctggattggcgggattttcaaactgtaagggtagataactgtcagcaagttcctcatgcagtcttttcgcttcttcgatcgcaccactgatcccttcagcaattggcgtatggacaatttccgctcctaaagctcgcatcaacgcttgcttctccaaactgaacttttctggaactacaaaaatcgtcggtaagcccgcctccaacgctgcaagggccacgccaatccccgtattcccagcggtcggttcaataatagtcgtcccttctttgatcctgccctgtttgaagccttcttcaattagataaacacctagccgatctttgatgcttccccctggattcaaatattccagcttcgcataaatcgctgaaccttcgggaatttcttcaaattgatggtgagtgaatcgcagcagcggagtatgtccgattgccgcttggatagaattaataatcatcattgctctcctcgtatttatttttttcgcatgtttgtcgttcaattttaggtaacaaaaaaaggcgccgactattaatcagcaccttgagcttccactatattgctcctgtaaattcccgttcaacgggtatacaggtagccaaaataatcgaaaattgggcagttaatagacatgacaaaacggtatgctgctttttagcaccatacaacaacagcaagattcagttgcgaactgtttgctgaatgtcatgactatacctccaaaaatttttagaccatttagaatagttaaaaaattaccatagatagcgattactgtcaaaggaaagactcatggggttttaatcgaatgaatagaaataccttttacctaaaccctcgactatactcatactccttttcgatcaatcatatcaagcgacaacttagaattagcccctcaacttcgagtgattcaaacagtctttcaatgtttctaagacctaaacattctaattgaacaaaaactttaattatactctaaattgaaaatcatttcaaatcgcaatttgacacttaccccccctaaaataaccattttcggggtaaaaaagccacttttcaccctaaaacgtgtcaaattgaggggggtaacggttattttgcgattcgcatctttttgctaaatctcgtatcgtgtagttaacaaaaataataaggctatgcaggacgctgcttccttttctcaaatagaaaaacactgaacgatcatataacacacccacgaggaggaaaccctaatgaatgaacagcttttgacatacaatcaaacattctcactaaaaccagaaacactagaaaaacgcatcatggagtattaccaagaaacacaaaatagtagtttaaccatcaagtatatcttagccttacgcgtacgcttcaagcttggcgcgcaagagttcgcccacattctagaggatcttgtccgctacctgtttatgaataccaaagccacacgtacgatgaaacgcttcttctattatttcaaagattacttcatggaatctgagtggaaacgactaaccttaagagtctttcccataagaaactttggcaagaaagtcgtctctgctgttcgttcactcatttcggctgtccgtccagaagaaacgacggagacctgagataaaacaccctacgcataaaaacaagaaaggaaggattcgatgagaaccgaaacgacagatttagttgcattatttacgaagaataacggtggcaagcacaactggcgctacaaaggtgtggacaccagcttgccggcagaagaaatcaaagaagcttgcgaactattaacgacactcgacctttttgaacaagatggcgtaaaactatttgattctgtcttatcggcgaagttcgtcaccacgattgaaaccatgatttttgatttagagcatgaccacgaagaaacacaacctgaagcagaaaaaatgaaggacgccacccgtaaaaaggtttgctcttttgaagtcactgatgaatctgacaaagtaaaagaaaccctgccaaccaagttgttgcgacctagacctagcatccctgtcttaagccaagcacgtgaacgtcagtatgaacacattgaaacggtagatacctcgaactctatcacgatcaaccatgaggcccttccgccaatcaatgacaagcaaattattggcgatgaagcagagtcaaatatagagcaaattcctgacactgaagtacagagcactaaggaaggcaaaggactgtttcgctggattcaaaaaatcaagaatcgaactcgaaacaaagaagcgccagagagcacaccacgagaataacccttcacaattaaatcctgtcattcatgcgtaggaagcaaaacaatccccccctgcgatcacggtctcagggggtgtgaaaatatgttagaaagcgacggtatgtttgatgaaccttttacctactacatttggaggaacactcttgaattgtctatttagcagctttttagctatgcttggattcaacgtgtccctgattactctcagcttgattgatctggaccagatgacccgctacaggaagattctacagcccgtccttcaatcttatcggaacatagcgttgcatttggcgatagcccagacctttctcgatgtccttttggtacgcattttcttcgtctaaataaggcatattgaacataaaattgcgggctttatccacttcaaagtttgttccttctacccactgaaaaattttgtcttggactttctggatgctctcatcgtcttcgtcaatactgacggccatcgcatacagaccacctggaaaatcaatcagctcaagcgggctcacatcggcttcactgacgccttctttaaccgcgcatatcatagtggctttgtcttcatttaccagcataaagtccaaacagtcaaaaataactggacgatacagcggaaaatgctgccacagctgaaacatatagccgccttttttgaagatctcttcaaaggtgcgttcgccagaggtgactgccctaaaggatggaattctgatcaccatcacatcgggaaccttcttatccaatttatccgtgatctcgatcaaacgattgatatttgctggtttgccaatatagtctacattgacaatctgtgtctcgatgtccttggccttgttatagagctgcttgatatcggcattatccgaaaaattcattttttctatttcctcgataaaatcaagcacaatacctttcagttcattcagcaaagagacctcatcgtcaatcgcgttgacctttctacctaaaacctccagcacaacatccgagccggaagctttgaaaatccgctggatgtcctttatgctgatgttcaatttgcgtaaaataagaatctgttcgatccgtcgaacggcttcttcgtcgtacatccgatacgtggacccctcgctgcgagtactattcaggatacccatatcttcataataacgcagcgcacgcgcagtaatattgtatttactggatacctctctgattttgactaaattattcatcgttcatctcctttcctgacttacttcattatgaaggcttacccaaaggaagagtcaagctatttttgaacttttcctaggcaatcaagcagaagctttaccgtcacttgtagttgtaaccggtctcttttataatggagctatcaaaacaaaggaggctcttgtttgactaacttgtgtttattatcggtgatttgctcttcattcagctaaaaaatccatttatatgaggagagcaaaataatgaaactaacgattcgagaaacaactaaagcagacaacgaaacgatttatctcatcgaaaaacacgcctttggagaagtagacgaggccgatttgactgagaagctattggccgaaccaaccgctcagccgcttttatctcttttagcatttgatgaggataaacctgtcggacatatcctgtttacgaaagcagcactcacgaatcacgaacagcttttggtcatgatcttgggtcctttagccgttatgcccgattatcaaaagcaaggaatcggcggacaattgatcaaagaaggactgcgcctgctgcagcaaaagcacgttgagttagtctttgtcttaggtcatatcgagtactatccaaagcatggcttcaagcccgcgttgccactcgatttccaagcgccttatccagtagaaaaaggcaaagaagacgcttggatggttcaagcgttgaaggctgattttccgatcgaagactacgccggaaccgtgcgctgttgtgatgaatttatgcggccagaatattggcgagaatagacgatccaaacccttataccaaaagtgcggtataagggtttttctttgcagatttagccgaagttgtatataacaaaagaaagtaaagcctcgcaaataagcgagaaaaggagtcccgatcatgtactcattagttcccgaaaatatgtatgaagtcgaacaaaaactaaattacttcaaagaaaaaggcgataaaatcaccgaagaagaagtcatccaacaagccgtactcgataatagccagcaaatcctagatggcgatctagaaggtccctactggaaagtgaaatggcagcccgaagataaaacccttgccatctttgatatcatgaacaaacaagtcggtaccgttgatagtctgtcgggatcgtttatcgatgacttccgcactagcgcaccaaatgtgattcgccatttggcggaggcgattcagaagattgtgaatgagaattagacgttgaaaagccgagcgactttgtgactatcgatgatagtgcttggtcgttcggctttttagtatttgtaaaaatgattgtgttctttttgtactacttatatctagttgtaatcagatgacacattgaacttcgcgcatcaagtcatacaagttgatgcactcgactcctaaagctgcgcacacatctggtattcgtggctctttgcttgtaggatttttagaattcaagttcagattacgctcttccattgtcacaattgtgtagtcataagcttttgctaaggcaattaaccaaggatcagccttttcaaaagcagcccactcatcatagcttttttgtttataaaaaggggattcagctacataattcagtaccgttgcatactcgttcaatacgatactatcactattgggcaagattattttccccttggctaagcaattttcctcaacccaaatctgtaaatcatctttattctttttggcgtgacacagttcatctcgaactttgtccactagataaatagactgatcataggtctttttaaaccatttccaaaaagaaggaaccaaatcaaattgataaaacgttcggtagggtgatattaaactgttgctgtcaattagatacttcttcattatcgcccctccatatgattcaccaaattatcataagttttaccttttgctcctaaaagatcgtaggcttctgtatataagattttcccttcttttgctttcctatttacagaatgaacaaaatttaagtccagtctcgagccttgcgtattgtagtaatttccacccgattttttttcactttgttctttagcaagtaaattatcgtgcatttcttccactaacacgcccaacagttcatcaaatgtcttcttggtaactaagttttgctgcttgatctttatacaaaccattaaagcacttacactaaactgactagaaatactctttacattagaatacgcatctacatcccttttgaacacgcgaatcagtaattttgttggtagcagcatctccgccgccacttcattacaaaatctttctagtttttcatttaagtaagtctggtcacgataaaaggagtcattatacaattcattaacacccaaccaaacatgaaccaactcatgacacaaggagaatattcttccatttaaactatcttttgcatttagaaaaatcaacggcgcataggcatcaataagtacaaacgctctaaactcagaaatatctagcgatctatgaggattattaccaacaatcccattttgcataacgagaatacctaagtcactactagcttttctaagtacattaaatgtgtcattactctttctattccaatcactagctaaaccaagttgcgcaataatttttttagacaatttcttgggatcatcattcacattcgcgcttcctacaatttcaagtggtaaaaaaccatcttctatcaacgtttctctcataaagctctgccgtgtttccatgagtttaatcgtatcaatcaaatctctacttggtttatcatgttcttcattatcaatcgttcgatattttaataaatcgacctcttcaactggtggtttttttagaaaaaaatagccgaaagggattcgtaattccttacttagcttattcagttcactgacacttaactcactttcagtagatacccactcatcaattttagagaatttttgagaaacttgaacaatacttttaccagaagattgtattgcccattgaataatagttggctttacaataattccttttgccattattttcacctccattacaactcaatcttaccacaaatgtttgtaaataatgtatctagaatttgtatgtataaaatgaccatcctatattgtttggaaaaatactcagtcgttcgcttcaatgagcttcaacgtcaactcaaaattatttcagacaaagtactgatcctaatcctaaagttaaaataattataagcagatgaactgagcaaaaaatcgtctacctacatcccctgcccaaggctgactatttatgtatcagcgtgttggagaaaatatttatatgaaacgatcataatcagatcggttaactagaaagactgatttgaataaacctcagatcagtctttctggtaagtaaaattgtggattataaattataaacagctgattccatttcttccatactcagttcattttttaaaaacttatcacgataagtttcataaaaagacaaaagtttttcaatttctttatccgaaaagaatacctcttcattaagagaaacggctaattcattaacactatgaactacatctctatagatttttatttttaatattctaaattctaattctctgtgccatgcataatatttattttgacctagcaacagattcaagagtccacgtacattccaatttacgcatttcgtatactttaaagcataaaaatctattcttttcatgtagttctcaatgtcattatttttaacaaattcactataattaagaagtttcatatctgatagtttaaacaaatttttgaacattcttctcaagttatatttagttaatccaaacttctttaaatcaatttttttaaccttagttttttttactttgtatatttttaatcttccttgatagtccttagtaataaaataagcatttttcattccataaaaaacacctctattatttatcaagaagagtctataagggtaactatcactttcttctaaatgtactattttcaaataggcttttccttccatcaacaaagcaaaaaaaatatttgataattcttcttgaaattgatatttttcaaaatgtctaaaaaaaacgctattttcaattatttcacaaccttttttatctatactataaaggtttgtaaaatcctctatcagcatatgtccataaaaagaatctatatacctcctttttttcgggacaaagagctgtggcttttttattataaatttattttccataattacctgtcttcctcccacttagtatgtgaaatatatttcgactcattatccaaataatcattcaacaccttaacggcatagtattcataaatcggataatttaatgagttaaatgatctctttgtctttcctaagaaccgttccaacattttattatctgtttgtaataatcgttgcccaaacattccctcctcataaattaatatgttactatcagcaacatgattcataaagtccatactccatttagtgtgcaacaatcctctataactagttgatagaatacctaaatctctttgtgcagtacaaaaactaacctgtcttaaacattcttctattgttttttgaggattgtgcatattttcaagattatctttaactgctctctcccaatcactattctgtgaaatatctccccataaacaagcgtaaccacaaatcatcatgtattctattttgggagatagaaacactgcaacattataattttttttatccgttattgaattctgtatgttaaaaaattgatattcactaatttctttgaactgcccaatttcccttgtaaataattccacatcattctcaaaaattgaacttaatgttttttcagtataaatattaaatagatatcctatgacgtctggaaactcaacttttaaatcgttaactttagcgtatactcttaaagagcacttaaataaatattcatctactatttgaaaacgatttttattgtcttgttctttttttactacaggctcttcacccaaatcattactataattggataaaataacgtccatctgtttcttgcataaactcagatgattaaatacaacgtatgattcaaagaaatatttatcttcaaataataacttcccatattcaacaacattatcataagtagcgagtatgtttttttctataaatcttttaacatagaattctttatctagtttaatcaatccagttaggtattctttagaagttatttgtctcttttctatattctcttctgtctctattccattaaataacttccaatatttttcattattgataatttctgaaaatttttctttatttttaaattgaaagtaaatttcatcaaagtcaatactttctatgatgatattactttgtgctatcaaactacgatatagaactaaaaacgtttcaattaactctaacttttgttcatcatattcttttgcatgttctgcaactataacagtatttaataaactatgtatctttcgtgtaaactttacgatgatctcaattttttttaaagagtctgccttagagacatttgaatttaagacttgtaaaaccgaaaccagtgctttagtgtctttgttcgatgtcagatatcctattatgctcttttcaatgtccagtatctcttcttcaaaccattcatcatttattttcatttctggtgaaagatgggagccggtttctatataaacgtctaaggagcttgcgttggctaaatgccatctaggatatactaaactctctttaaaccatttcgaattatatggaatagaatcacaatactcccaatatttaaaaataacagctaataatcttattgaaaaatctactgcagttttgttgattttttcaccgctatcaatattgtattgtgcaattaaatttaaatccataacgtttttggatgcgattttcttcaaatggttttgtaatgaaacatcactcatcattcctttatatttataattgaaaaagcccattactctatttaagttttgtataggttcagaagccaagttgaaactttccactagtcttaacgatgaattccctaattctctatatgaaacaagaatcactaaagtatataaggacaaccataaaacataaactaaaccaattttgatttttaataccaataaaaacaacgtcaatgtgcatgaaaagaaataattggaaatagtatttactattttcgttgttaacctatctttttcaaataactcccttattctttttggtgcatctgtatatttagcagaatatatactcataatgtttgagccgtatagccccaaaaatatacccgcaattcctagacctccaataatgtagtttagtaaatcagaactattgattgttataacttcaaatcgtttcaatagaaaacgatctaacatgataacgctccctactactaaagatacttttagaatctttagcagtaattgtcgagcaacaaacatatctattgttcgatcgacatttctatcctcaatacgccacgttattttaaattgattcttattcaagaaaaaggaaatttttttctttattagatctatcaataaatattttttcttattatttcccacaatgtacctcctttaaggtttgagaaatcatctgtctagtctcaattaaaaccaaaataatcacctatataatgggaagatttctaataatactgtctctgtaacaaggtacagtatatcaattgtaggttgtggtttacaaaatatttaacaaataagattttctttgtttaaccgaggaatctttagtacgttccaagaacaaatcctcgctttttaaagtcgatcgtagtagaatctatttaacttattaaaagtaagtaatttcaaagagtacaaaggaggtcatcttcatgaaaaaaatcggctttttgagttttggtcattggatggaccaaggttcacttgttaaaacggcgcaggattcttatctgcaatcgattgatctagcggtggaagcggaaaagatcggaatcgatggtgcgtattaccgcgtgcatcattttgcggatcaaattggctcgcctttcccattattatcagcaatcggtgcgaaaaccagcaaaattgagattggcactggtttgattgatatgcgttatgaaaatccttatatgatggcagaaaatgctggacttacagatattatcactcaaggaagagtgcaattaggcgtggggcgtggctcacctgagcaggttcttgatggttggaaatatttcggctacgactacagcgaagaagagattaaggatattactcgtgaacggacattggaatttttaaaattgatcgaaggcgaacgtttcgctgaacaaaatccgcagccaatgttcccgcaagcacctggaaaattacgcttggagccttattcagaaggcttacgccatcgaatttggtggggtgctggttcaactcaaactgccgtttgggcagcgcagcatggaatgaacctgcaatcgtcaacgttggtaaactacgaaaccaacgaacccttccatatccaacaagctaaacagctgcgggcatacaaggaagcttggaaaacagctggtcacgacttcgagccacgaacattagtcacccgttcgattcaaccgattactacagatatggatcgtcagctattcggtcatcaaggcgacgatgcaaaatatgatcaagttggtttcttggcttatcatcaaaatcctacaatctttgggaaaacctttgcgggtgaaccagataagatcgttaaggaattagctgaggacgaagcgatcaaagaagcggatacggtgttagttacgatcccgaacaccttgggagtagattacaatatgcacttacttgaaacgattgtaaaagatgtcgcccctgatttaggctggagataaatatactattagaaacaggagcaaatctaatttttcagatttgctcctgttttaaggttttagtatttattttacaatcaatacagattcaatatgaactatcttataagtcttgtaggattggtctgaataattgaagatcatctgaaaatcccgactgaagtgcggaatgttatttagagttggctatagagcgttaattaaatacaaaaacaaatacagatacaacccattcgttttcaccaaacaaatttgttacgatatcgtcaacacagaggtatacttgtacatagaacgactatatttaggaggttttcttaatggaacagttaaagctaaacaatggtcagacgatccctcaattgggcctaggtgtttttaaagttcaagatgcagatgatttgaaacgatcagtagccgctgcattaaaagaaggctatcgtcactttgatacggcagcgatctatcacaatgaagcatggctcggtgaagcactggctgagagtgatgtaaagcgtgaagacctgtacatcacttcaaaagtttggaacagcaataggacttacgatgaaacaatcgcagctttccacgaatctttgaagaaattgcaaacagattacttggatctttacttgatccactggccaagtgacggctacaacgaaaaatggcgagcaatggaagatttatacaacgatggcttgatcaaatccatcggggtttctaattttgaaaaaccacatttggaaaaattattaacgacggcaaaagtaaaacccgctgttgaccaaatcgaaactcatccctacttccagcaaaaggaattgaacaagtatttgagaagcttggatatcgctcacgaagcttggggcccgcttggtcaaggtaagagcaatgttttagacgatccaacgttagtgaaaatcgctgaagctcacaataaatcagttgctcaagtcattttgcgctggcacttgcaacgagaaatcattgtgattccaaaatcggttcacgcagaacggattgcgcaaaatatcaatgtctttgacttcacattaacagatgaagaaatgagcctcatcgcagcgatcgataaaaaccaacgcggttctggtgaccctaatgatgaagaatttttgaaaaattcaatgagcagagactagacttctctatttttaacccgcagtctctttgactgcggattttttgcttgattaactggcgataggattcacttatgttaggattgttaataagaaaacaacaggattttttagagtgatactcgcgctgtgactatagaaggccaggatcaattcaggaacccgttcagatcttaaaaccacttttcaagaaagaaggtgtcatatgcgcttttctacattatttgtcggatatagctgtgttttaggcttgttggtgggaataatgtccgctgtttttttgtcattcacaaaccttatgatagacgttgtatggacaactattccagaaaccttatcgatccccttttatccgatacttgttggattaatcggcggctgcttggttggtcttattcaaactaaaattggacgatacccgacaactatgcatgaaacattaagtgaattcaaacaaaagaagcgggtaacctacaaaaaacaaataggcaaaaatttcttgtcagcaatcatcgtcttgatgtttggtgccagcctaggacccgaagccgcacttgctggaattatggggggcttgatcacttggatgggtgaccgactaaagctaactctacaacgcaaagaagaactattagaattaggtattggaacaatgttagccgctatttttcgcgcaccgttggctggtgtcagtgaagtatttgagcaaaataatccgccaacaggtaatgataaagtaaaaaaaacgatcctctatgcacttagtacaggcttcggacttttaggattccttcttattaaacgattatttccagaagaaagtattttttcactgcatttccccaaaaatatttcttggaaatggcaggcaatagtcttctcccctgttagttggttgatcggtggtttattcggtgttctctttttggaacttgagaagctgactgaccgtctggctgcaaaaattgataatctagttatttctgcgttgattgccggactctgtatcgggatatttgctttgtggtcgccgtattttctattttctggtgaacagcagctattgcccctttccaaacaggcacttcagctctccttcatcaatctattgttattggggatcggaaaggcttttttgacgaatctttgcttttcctttggttggcgaggtggtaagatttttccggcaatcttttctagcactgcaatcggctttgctgtagtccgattgattccttatacaccaggcttaatcgtgggtgtagctgtggcagctagtaccactattattctccgccagccttatgtatgtgccgcgttattgcttttcttatttccaattcaatttttcccctttattcttatcagctgtcttggtatgaaacgctttgaagaatatatccaagctaaaagaagatgatcaggcaggagctgatcaaaagtctttggactttcggattagctcctattcacgaataaacggcagcgccattccggtccaacgatttttctcaaattctctagagcagcctagccttttatgggctgtttttttgttgtgtcatcattatctcgcagctgataaagaacatacctacaacaaaattattgaacagctccctcgctaaaaatataaaaatcgttctctctcattaaccgcattagttataccacctcttctttattttcacgaggacaagagacataaaaagaaaataaataaataaaattgtcatccacgcaccaaaactaaaccaaatatcggagaaaacccaccgaattagcatggaaaatgatggaaatcaaataatttccatttgaattatttatataactatctttttgtcaaaattattcaatacaccgaaacaggacattttcatttttctttctaactattcctctcagatacctatcaaatcgagatattttacagtatttattctcaatatttataacaatgaacgacacagttttatttttcgttttaataaaaaatgctgtcgtcgttaaggggcataaaatggaaaaaagcctagaaaatctgtcacggagtaataaataaacaatttataatgaagataagacgttgttattttttagtattcactatcactaattaaataaattatttgtcaataaatggaaggagtggctctatagggaataaataagatctgatgtcaaaaacagaagggagaaatgggaagaagatgaaaaaacttagcggaaaaataatgaataaactgatgttagtcttagcgctttccaacttcgctgcacaaccgattgcggcctttgcaagcgaagagacaacagcaacaaatgaaataagtgaagttattgatacaacgccaagtgaagagcaaacagacgcggagatgcccgtagatgaatacttagcacaaaacgattatacgtttagcgagaatggcaagctgaagtcaacaaatggcactgatgttcgcgaagatttaaaagaagttttgagtgtgcttgaagaaagatacggctatcgaacttcttcgcttaccagaggagcgagtgatgtctatatcgatgccgattataacatcaaatccgtcagctgggtatattccaatggcgaagaaggatcacgctggttttcaaaacatgataacgacggagagcgcttatggtgtatcgaacctggtgcacccctttatgcgggagaaaattcaggatttacccttggagaagacacttcaacgaaacttcaacgtatttcgttagctgcttactttggctacgaaaagcaaaaatcggttgaaaacgccttttacactgaaaagtatactcaagagctggcgactgggattggtctaaaatcggtttctgactctgaaggtcatgtaagcttagctggctataataaattcaagaccgaaattgaagaaaagattcgtcctttctacacaaaaccgattttcgcaggtcaaaacatcaagatcgatgttgggcagacactgacgttaacagatacaaacaagagtttatccgcgtataagcttgtgtcgaaacccgcggagatggatgtgaaaaagaatggcaatgtgttgacgattaccgccaatgaagccacaaatgtcagcgagcttaagttcgcctttgatattgatagcgattatgttggggcaaccgttgtctataagcatagcacgctgcaaaatgtggttcgaggaagagtctataatccaacgcaattttcacttaacgcggtcgttgaaccggatgtgaaaaccgccgcaaccgatgaagaagatggcgacaagaatctctcgccagaagaacaagtaacgattgtcgatcatgtggactacaagaatctctacacagacggtcgtgaatacacggttaaaggcaaattgatggataaagaaacaggtgaaccgttactagtggatggtcaagaagtgactgccgaaaagacctttgttccagaaaaaccagatggaacgattcctttgtcattcaccttcaaggcttccgctttagctggaaaaaccgttgtcgtatttgaagatttactgacggataatattcaagtggctactcatagtgatcttactgatgaagggcaaacagtcgagttcgatgatccaaaaatcggaacaaccgcaacgaaccagacagatgggtcaaaattagtcgaccctgagaagaaagtaaccttcgtagatactgttgcttattctaatctgcaaatcggcaagaactataaggtatccggtgtgttgatggataaagcaagcggacagccgttgatggtcgatggagaaacagtcaccgcagaaacagaattcacagcagaagcagccgatggcacggttgaagtcgtctttgaattcgatgcttcttcagtcgcaggcgatttagtggttttcgaaacacttgagcgtcaacactctgtagatgggaagtatcgttttgttacagaacataaagatttggacgatgaagggcaaacgatcaaagtaactgatccaaaaatcggtactcaggcaactaacgcaaatgatggcacacaaattgtggaaccgttgaaagaaatcacgatcaacgatgaggtctcttacgaaaatctgattgagggaaaagtttatactgttactggaacattgatggacaagtcaactggtgaaccattattagtcgataataaaaaagtcacggcttcaacgacctttattgctggcgttggcgaggtctctaaagaggaagctgtcgatgctgatgaagtcccaataaatctggtcagcgggaaagtaaatgttaccttcacctttgctggcgtgaagctgcacaataaggaagtcgtggtttttgagtcacttactcgaaatgagacagaagttgctgttcatgccgatatcaatgatgaaaaacaaaccatcaaattcaccgatccaaaaatcggtacaaatgcaaccaatgccaacgatggaacgaagctttttgatccaactgaaaaagtaacgctaaacgatgaagtgtcttacgagaatctgattgagggccaagtctatacagtcactggtattttgatggataagaaaacaggacgttcattatcagcgaatggaaaaacccttactgcctcaacgaccttcattgccggtgtcggagaagtgtcaaaagataaagctaaggatactgtaactgaaaagaaaaatctggtcagcggaaaagtgtctgtcgtctttacctttaatggaggaaatctgcaaggacgagaaatcgtcgtctttgaatcactgctaagagaagacttcgaaattgccacacatgcggatatcaacgatggaaaacaaacggtgaaatttatcaatccattaattccttctgataaatcgaatacttatttatcaaagaaacttcctagctcaagtaccagcgtgattagttctgactcaagcctaccacaaacaggctctagtaaatcaggatatctcacgattatcggtttggtcttagcagcattcgcttttgctatctactatcgtaggaaaaaagtaagctaacgaataaaacaggttctgaaatcacttcagaacctgtttttttattacatttctttaaaagggaccactgataacgacttttcctagcatgtgaccggactccacatccttggtagcctgttttaaattctctgcattgattcctgtatcatagattttgctgacagtaggaataataatccctgcatcagctagttcagcgatcgtttttaaggcattgccttgtgattcaaggtcatagccaaagtcggtcttcgcgaacatatactcccaatcgaaagacaccgatttatttttccactcggcaagctctagtggttccttgattccaacaattgttcctacatgaccaaaaggattgatcatggatttgatgatatctagatacttcgtgatatcaaataaaacggcaatataatcaaatgaatccgttccgatttctctaagctgcgctttaaggtcctgatggtaatcaagtggatgatcgacaccgactttttttagccaatcaaaattcttaggatttgaagtagcgaatacttctaggccagcccattttgctaattgattcaaaatagaaccaactccaccggcaccattgatcactaagattgattttcccttagccgaatccttttgaggcacgatattaaatttgtcgaatagtaattcatacgctgtcaaagaagttaaaggcaatgacgctgcctcttcctttgttagtttttcaggagctaacgccactattcgttcatcgacaatctggtattcttgattgctcccatggcgtgtcgttgttcccgcgtaaaaaacatgatctcctaccttaaagttctctacttcattcccgacagccgccacttcaccaacagcatcaaaaccaagtacccgaagtgcattacttgttcgtgccgtttgacgcagcttcgtatccactggattgaccgagacagcttgaaccttgactaacaaatctcttccgacagctttaggaatttcttccttcgtatcaataaagctgttaggatcatcaattggcagtccctcaaaaaaacctatagcgtgcatcatttctttttcagacattattatcggcctcctatgatttatgattattgaatcacttggtaaacatcacttaatttttggcgctttttctctgggatcgcttggtctctgtaaccaaaaccagccatataagaaacaccaaattcttcaggatcaacatagcccttttcaactaaatactgatccaccgcatctttattgaagccttcgatcgggcagctgtcgatatccagatacgcggcagttgtcatcatattggctaaagcaatataggtttgttttgacgcccagtcgaatagttctcgctctgaggacagatcaaaatcatttttttggaaattattgaagaaaatcgtttgcggagattcttctgaatacggaacgccaaaaacatcctcaaccatatgtttgacatgctcactatttccagtcagattttttctagccagaacgatcagaaaatgactggcgccattcaaactgtttcgtgcgccccaagcgttctcttgcagctcgtccttgacttgttggctttcgatcaaaagaaacttccagggttcataaccgaaggagcttggtgataaacgaccagcttcaatgatcgtttcccagtcctcgttgctaattttcttacttttatcgaatgctttggtagcaaaacggtgtttgtgtgcatttaaaatttctgctcttttgttcatgtgtttctctccctacttagatttagccggctttttgccaatgaagatccggaataagctatatggtttttcccgcaggtctttgccataatggaagcccgcttgacgttgcagctgattactattgaagtacaagtattcatctggaccaatcgataaagtgtctggccataaaattcttggatcatgagcgatggtttccattgtaccatcagtataaatcgcgcgaatcccattgttttcatagtcaccagcatagatggtcccgtcaattgccgtaatcatgccatcagaggcacccttttctccccagtctttgacatgtgcttctagcgcatcgtcttcgattttttcatcaaaaatgaaatctgtctcaatggaataaagatgacgacttgataagggactataataaagcagcttgccatctggtgataaggcgattccgtccgcggctacctgccaaggagaagtctcaccattttcgtcacgattcattaagatttccccttcgactttcggtagaaaatctggatctaccgctgtcgatggtgttccatctaaaattcggaaggcatttcctgtatctaactcaaccacaataattgcgcccgggccggtaattgatgaatcggtaatataagcgacgccttctttgccgcgacgaagatcgatacgggcatcatttaaataggtcgaatccaatactacttctttgcaaaaggtgtatacacgacgaatcgtgtttgtcgcaaggtctaccgctactaatttagcagctccttcgaccggaacatcaaaatttggcgtagctgtatctaaaatccataaggttccttctccgtcagcaacgatgctttggacacttaaaaagcctttttcagaattcgctggatcaaaagtattggcttctttgcttggataaggcaccaattctccatcaacgatctcaacaactgtggcttgaacatcatcgccccattcagggaaattaataaaaattctgcctgtctcactgacacttacacctgtgggcatttcgccgtaaaacgcatgaacctgttctagctcaccgaaatagttttctgtaggtaatcccataatatccttctccttttcattctgcacatgatatacactaacaggctgctgaaattttcttcgcatagtttggggagtcgcctgttttgtacagctatcataaaaccagtgtctacaaatgtaaattagggaatttttttatacctatgactttttttaatttttcttatccttcgttttcggagataaaataatagacgcttgttttcgtctgtgttaaaaagatagtattaaattaacaatgacggctacagtctatgaggagggcccaacatggtccgaaaaatttataattgtgaagaaggttgttctgtcgaatccacgcttcagctgatttcaggaagatggaaaagtgttctattgtatcatcttatttttgaaggagagcaccgctataatgaattgcagaaaaaaatcccaggcatcactcgcagaatgctctcactgcaattgaaggatttagagagtgatggattgatcagcgccaagttattcaagaaaaacccttgatggtctcttaccacatcactgactatggccattcattaaagtcggtcatccagatgctgcaccaatggggaaacgagttcaatcaaatcaacaacggaacattggaaaaagagtgcttgatttgtaattagtcgttatacataaggaaggcttcgcgaacatgcttagccggtcatggatatacccgctgtaaagcaatttattcatgtggaacttttatactttccttatagtaaaaaaacagcggagttgactaaaaatcaacttcgctgttttagcttattttttgactggtcttacatatttccaaaagcgttctggatcatgataaaagtagatcacacgtcctggcgtagtatcatagtgatactcagtgttcgaaaaatcgaagcttgccattgcttgctctactttttcctcgacactgcgattttcctgctcgtaattaaacggaccgtgttcaaaaaccagatactctgcttctggaacatccagcatcagcatttgctctggtacctttccttgataatcagcaggtaaacgagcaccgtagcattccgatcgcaaaaagccccagtcacaaaggcgcccttctaaatcactgatatacgccatcacttgaccgctgctgctgtcaggtttatgaccgccattatcatctagctttcctttgatactatccaataagccgctgatcgtatcacaatcctgtccgggaatccgactttgcttctcccaaaaatcccaatagccattactctgattgtttttgatatacagaaacttatgggctgggatcgtcacaaaatacgtcttgatatcgtcggtagatttcaccatgccgatctctcctaatcctaaaaagtagcggtcaaatgagctgattctggttcgaagtaccaccggcttcggctccctgcgatactcactgggagcgactccatacatccttttaaatgcacgggtaaaggcttcatgcgaggaaaaaccataatcaaaggcgatatccaaaaagcttttctgcttgtcgcgaacttcctttaacgcaaaagctaattttctctgacgcaaataatcacgaaaggacatcccagaaatttccttaaatttccgcgtcgcgtaaaattcagagtagcccattttgcgagcaagcctccgcagtgtcaatgcttcatcattgtagccttcgatacagtaatcaatctcctcgacaatctgttggatctgccgctgccattcatacatccttccaccaccctgtctttagtatagaaatcaggaaagcttgtcgcttgatttgacttgcggtgttaataaacaatctttactttgtcattcatgatctgctttgttcgctcaataaagtattcgcgggacaaatcctgcccttgattgacatggatcatatgctgattggctaactcgtttgtataatcctttagcgcataggttttgtacgtttgataattgtcgccaatatacgtaatggtcggccaaaattcgacctgttcgatcttgacatctttctgctttttattgcaatcaatcgtccagcggcccataccgcccagcatacgatcattttctgcttgagaagaaatgaagtttcctaaagaatacattaccaacgtttgattccctgattttcctgtcagataatccatcggctgaatcacatggggatgtcccccgacaattacatccacgccagcatcgcttaatacctgtgctaaatgcgtttgctcttcattcggagtaaattgatattcttctccccagtgcatactgacgatttgcacatcactttccttcgttaattcctccatatcctttttgatttgttcctcatcaatcagattaacgagatagtctttgccctctggcaggggaatcccattcaagccaaaagtgtaggacataaatccgacattgacacccttgatctttttgatctgcagtcgttttgcctcaggtgatttttgtgaccctgtcacagtgatatcaggatatttttccaaatactctaattgtttgatgatcccttcctcgcctttgtccagggtatgattgctcgccgcagacaaccaattgtagcccgcctgatgcagcgaatctaaaacctgcgtcggaccattaaaagtcgggtatcctgacaatcctaactcttctcctgcacaaatcgtttccaaattaatataggaaacatctcgatcctcgttcaaatagcgtgttggttcatacatctcatcaaaacgataggtgccttcgggctgtctgagatgatcatagatataatcatggatcaaattatcccctaccgcagagaaggtcagctttaccctatttcttgttttgggtttcgatgcctctgaagttttatttcttgtctcgttttccgcttctttgttcccgcaccctccgagaatgactaacaccagcaaactaatttttaaaaagcgcttcataatctggttcctctcccttttagcctttacaacgaacaaatgactccctcaacattacacagttcttttaactaaaattttacggcaaatgactcgatagataaacttttttattaaaaaaagaaataatgaaaatgattttctcttctgtttattcagcttctttttgaatctagcagaatattttttccgttaaacgattgctgattcatttcatttatcataagattagcccgtaagcattttctttcaattcattaatggaggcagacttgtgaaaaaaatcatctatttttcttttggtgcgatcacatgtgcactaggaactttgggaatcttcctgccctttttgccaacgaccgttttttacttgctgacggccttcttttggctgcgcagttcagataaatattacaacaaattcattcaatcctctttttatcaacgaactgtggatgagccgatcctcaaaaagaaaatcaccaacgctgggatggtcaaaatgtttttaatgatccttgtagtctttctaatcccaggattattagtggataatacactgatgcgaatttgtttagtggtgttatacctcgctcacgtcatcggattgacctggtatctgcgggggaaaaaagatacagtaaaaatgagcgattcaagtgattaagcgacccactgccttagagatagacgttattctttttgggaggatataaagagcaatacacatttaaaaataaaacagataaaaaggctgctcaaaacccaaactacaagcttgaagcaccttttatctacagtctgacaagaagatcggtttcttcttgtttttttgtctttatgttatttcctttgcttcccttatcttgtgaaacattcttaaaatatcgagtgttcttaaaagacaaaatgacagacgttttctatactaggtaggaaataaaaataagtgaatgaatgtttatattcaaatgaattggctcacaattataactgatgagtcttattttttgcttaatatagtctattcgttcataaatattagactttcgcaggaggaatatcatgagaaaaaaagtcttcttagtctttggaacaagaccagaagcgataaaaatggctcctttggccaaacaattagctgcggatgcacgcttcaacgtaaaagtagttgttactgggcaacatcgagaaatgcttgatcaggttttgcagacctttggaatcattcctgactatgatttaaatattatgcagcaaggacaaaccttaaacgaaattaccagtcgtgtcatggaaaaattgaccgctattttacaaaaagatcgtcctgatattttattggttcacggagatactacaacaaccttttcagcaaccttgagtgctttttaccagcagattccaatcggtcatgtcgaagctggcctgcgaacgtgggacaaatactcgccttttccagatgaaatgaatcggcaattaaccgatagtctaaccgatctttatttcgcaccaacactcaaaagcaaagagaatctgatcaaggaaaatcattcggaaaagcatatctatgtcacgggaaacaccgctattgatgcaatgaagaatacattagatgaccattacgaaattccagttgaaatttcaaaaggtcagaaacggatcgtcttaatcacgatgcatcggcgcgagaatcaaggcgcaccaatgtattctgtgttcgaggcgatccataaatctgcctatgagtatccggatactcaatttatttttccaatgcacaaaaatccagcagtacgaaaggcggcaaaagaaatattgggcgaagcagaaaacatttcgttgatcgaacctttagatgtagttgattttcataactatgctaaacaaagctacttgattttgacggattccggcggggttcaagaagaggctccttcattaggggttcccgtcctagtcctacgtgaccaaacagagcggccggaaggagttgcagcaggcacgctcagattggttggaacaaaaacgcaagctgtttacgaaactatcagagaattatttgaggattccgctgcctacgagaaaatgtcaaaagccagcaatccttatggtgacggaaaagctagtctgcgaatcactgaagcaatcgctcattattttcaattagcagaccgcccagaagatttcagccttcaaggagaacaatgatatgaactatttacgaagaattcgaatcgagtggatgtcgatcttactagccgctgtcttcttgattcaaaatttaattttagatgatcgttttggatttgttcctgttgtaaccctctcccttttagcctttttagggctattggtaggctttttaggcaatacgattaccgtcgcagttttttctatgctggtaatttctacaggaatctttcttttgtattacactccgatcctaatgccaaatctgcaaaaagtctatttgatcattgtcattccagtctttgctgttttgggtctgatggcgaaaaacagcgtgctgttcaatcaacgcatgaatgctttccagccaagaatgcgccattatttgacgaccctgaatgaaacgacaggcttgtacaataaaggagaattcgaatcacgctttgaaaaatttaaatgtgccatgaatttgtatgctaaaactggtcgtggtttggttgtctccttttatactgttgacttcattgaacagctaaagtatcaaaatgatcaggcgacagatcaattattgcaggcgttggcccaagaattagttgatattcgactacctgaagaagatcaattttatttaggaaatggaaccttcgtggtcatgtctccaatttatcaatcaggtgacagccttgagttcatccaagaattgaataagattaccaagatacagttctcattatttcccttcaaaaatgctgagcgctcacaaaatacgatcattcgttttggtgagattgtcattgagggctctacagagttgaccgccgagcaagtaatcagtcgcgtacaacgtcgctctgaggctgatttgaccgatgaatatattttataaggaggaaaaacagatggatcaattactcaattatttctttgaagcgagcaagattgtcacggggattttcttagttgccgcgattgtcttatttatctgcttattgatcatcaaggaccgaatttggcgttactttaggaggcgggattactaatgagtacgattttattaatgtttggggtcatctcaatctggtgctcgctgcttattaccttggtcattctatttggagctgtttatttcttactaaaaaatattcgtccaccgaaaaatcaattagagcccctcagctcctacccgcttatcacaattgtggttccagcacataatgaggaaattgtcatccaagataccgtaaaggcaattttgagtatgaattatcctcgagaaaaactggaaatcctagtatttgcggataattgtgacgatgaaacttatgatcgagttcataccatctttcagcagccagagtacgagggctactatttaactaaagtaatcgatcgtagaggaactggaggaaaagctggtgtcttgaacgattccttaaaaatcgcccatggggaatacctctgtgtctatgatgcagacgccatgccagagcaaaatgcgctccatttcttagtagaacgagctttggaagacccagaccgtcacggagcggtctttggcagaaataaaacaagaaattataaacgtaactttttgacccgttgtattaatttggaaattgtcaccagccaacgaattatccatacaggcttatggcaattatttaaaattggacagatccccggtactaattttattattcaaacggagatgatccggaaaatgggtggttgggacaatggcgccttgactgaggacaccgcattaagctttaaaatcatgaagcgcggcaaattgatcgctttggctccacgttccgaggccttccagcaagaaccagagactttatccgtttattaccgacaacggaaacgttgggctaagggaaattacgaggttatcgtaagcaatctcaaggatatcttcggcggctccaactggcgcatccgtttacaaagtatctattatttcaatacattcttttggtttacaacggcgattattctatcgaatatcatgtttgtcgccaacctagttgcaatgcttctgcatatttggtttccttcggtcaatgcgatttttacctttggcggaagtaatcggcagatcggcgctcttttactggtgaactgggctttaatgtttgcgatctacttgctgcaaattcagttggccttatctagtcagtttgggcaggcgaccgccgcgaatttcttttatgccattgcatcttactttacctattccctgctattcataggcatttccatcgtctcatttttttcctatataggagataaaatgtttcaacgtgatagcagcaaatggtataaaacaaaacgtttcgataattaggaggcaattttatgcgcagacgtcctgcgattatgtggtcactattggcattgcttttttggggctatatcgcaatggtactatttaatataaacgacaatcagaaaaaattagagaagtcagcttatcagcaatggcactctacttatgtgaaaaaaagctctgtagggacctttgtcaaaacaaatcccaaggaagaaatcgatatctcactgtctgaaggacatggctatggcatgctgattaccatggaggctgtaaaacgtggttgggcttctgaaaaagatttcaatgaattgtaccaatactacaagaactttcaaatcagtaaagataatccgctaatgagctggcagcaaacatatgaagcaaataaaccaataaaaaaagaagcgacgaatgctacagatggcgatctggatattgcttatgctttgatcgaagcaagcaaacagtggcccaatagtcaaacaaactataaagccgcggcacaaaagctgctttcaggaataaaagcgagaaactataattctactaacaaattattaactgtcggtgattgggccacaaaggattctgactcctataacttgattcgaccatcggatattgttcccagctattttgataccttcgcggcatttagtggtgatgatttctggcgaacccttaagaaaaattcggtaaaagcactggaaaatttaagtaatcagcacaaaaccggactgctgccagactttgcttgggtagaaaaagacacggtcactccggcaaaaaagaatcaaatcgctggagctaatgatggcaattatggcgccaatgcctgtcgaatcccttggcgacttgctagctcgaatgacaaagatgtcaatcaagttttaagcaagatgatgaacttcttcttagaaaaaaacacgattaatgaaggctacactctatcagggaaggccttatcatcaaaccaatccaaaagcttttcggcaccaattctttacgccgcaaaccaaaaggaagcctatggcaacctgatgaattcacaaggctgggtaataaccgatgggctttctggcgaggattactacggtgataccttaacaacactgataactctgcaaatgaacccaaaataaagacaggaagagcgcttcttcctgtcttttcttcatcgaaaaatctcaaaatcatacaaaagattctttaggttttgaacatcccatggcaacagctccgcgatggtcaatcctacgatctcgctttgctctgcaatagcttccatggtctccttcacttctaataaggacatctttccggctgcagcagaatactctgtgactccaggttctgaaaaatacaacatccgaaattcattaggatctaacacatccaggtcaaaatgaataactactttggtaaactgttgttttcttagccacgcctggatttcgttaggagcaatccgcgcttgatcttgcacctgataatctattcccaatccttccaaaatcgctttttcatctgaggttggtgtttgaagcccaacatataaaatatccttggccgcaaacggatgctgaaccttctctgctagtacaggatcaccagccttcaacaaattccccaaaaccattgcatgttcattgtaaaaaatatccggcgtcgaaatatctggatgagcatcgatccaaataatccctaatcgctccccatattttccatgcaggtaatcaaaaggcgcctgcgaaactagacaatcgccacctaaagtgatgattttatcaggcttctcctcttgaatgatcgccattgtctgatccacattctcagccacaatactttgagctgtcaccccattttctcttatcagcggtacttcatattcaggaataggaacgttgatttctttgtgctccaaatttttaggcaccaaaaacgaaagcaaatctgaaccaagtgagtaggttggattatttccaccctgccattgaggaacttttaaacggattgttttaatcaatgatttctctcctctacctttttttattctcttgctttcatcttaccttttaccgcttcgctgatgcaaatcagaccgcttactttccatattctcctaccaaataaccatattgtagaatgtgaccctccattgcagtcaatagttcttttttcttagaagatgcaagtaaatccaactttttatccaaggcaaagacatgatatttgtatcgatgcctgccaaatggcggcttgggtccgcgatagcgatgtttcccatagcccattccttgcacagcattattcaacgcagctacttgttctccttgcggtatttccgctggaatcgtatccatcaccggaagattccaaatcagccaatgattataaactccggctaggggatgatcaatgtcatccataattatcgctaaagaaacagctcgttcatccagctcagaaagatgcagttccggagaactatcctttccatttccagtgtaatcaaccggaatcgtgccattcgctttaaatgccggacttgttaccgtcaatttaggaacattttcaattacaaaatccttttgacgaataaccgccaaaaggatcactactaaaataagtaatacaataaggatacttactagcatttttcggctccttctcattaattttcttcccttaacgtccgccgaatccgactcaaagatactggcgtcacaccaatgtaagaagcaatatgagcatgactgacgcgctgatcaatatctggaatctcagccttcattttcacatagcgttccgtggcgctttccgttaataaggccgtctctcggactaatttaacgcgcagagtttcttccagaatgccgatataaacttggctcaatgaagaagcttccagcatcagcttttgaacctgcgcataatcaaaacataccaatcgacacggttctactgcctcgaaattacacatgactcgtccgctaaacaccacatgctgcgtgctgaaaacctgtcctgtttctaaaaactgatgggttatatcattgccctgataatccaaataatacttgcggatcaacccattcactaatacatagagcttattttcctcatcgccagccgccacaattaagtccccagcaggaaaatccacaaactctcctaaatcaattaactgtccaagaatctcttcctcaatcggaattttggcataccatttcaccaagttcttgataatctgctcaatttccttcatcggccgctccttcgctttttatttattgtaacgaaggaggaaagctctgtcattaacataggataagtgattgaatttgttgtaaagctataaaaattttttaacccaacttatcccattcctgtacaaaagttactaattagtaactatagaactttaaagtacgtactatacagaaataaacttgccaaatatactagcttcaggaaacgataaggaggctttcacatgattcattcattatcagataaagtaacatttaacaacggaacaaaaattcccggattaggtttaggcgtttttcaaattcctgacgaagatacccctgaggtcgttaaaaatgggatcatcaatggctatcgattaatcgataccgctcaaatttatggaaatgaagttggaacaggaatcggtatcaaagaaggcttggccgcaacaggactaagccgcgaagagttatttgtcacatcaaaggtttggaacaatcatttaacctatgacgaaacaatcaaagctttcgaagaaacactgaaccgcttagctttagattatctcgatctatacttgatccattggccaggcaaaaatgccttcaaagaatcttggcaggctttagaagacttatatgcagctggaaagatcaaagcgatcggtgtcagcaattttgaaatccatcatttagaagaattgctgtccttcgcaaaaatcgttcccgtagtcaatcaagtagagttgcatccaaaattaacccaacaaccacttcgggatttctgtaaaaagcatgacattaaaatccaagcatggtctccattgatgcaaggaaagattctaaatgagtcagtcgttaaagcgattgctgaaaagcatcaaaaaacacctgcccaaatcgtcctacgctgggatatccagcaagatatcttgctcgttgtaaaatccgtgcatgaacaacggatgcaaagcaatgcggatatctttgattttgcattggataccatcgatatggaacgcttaaacaaactgaatgaagccttgcggagcggtccagatccggatgtatttgatttttaatagacaaaagctgcttcaagctcgtaattttcgagtttggaacagcttttgacttattttttacctacaatgaataaatacattccttctgctggtactaattgttggataatcggcaattgcagtttttccaaactttccttcattacatgtgacggaattcgatgcccaccattggcatgcatagtttctgattcaaactctaaaataacaaactgtccatccggcttaataatgcgcgccaactccttcaacgcctcctcaaacggatgaacctcatgaatcatcaccgaaacgagcgcaatatcgactgagctgtctggcaagtcgattgctttaatatcaccactcatacttgtgatatttgtcagccgtgcgtttcttgctcgttcttggatcaattccagcattttttgtgattggtcaaaagcgatcaccttttcggcctgttttgctaacggtagggtcaaaaatcccgttccagccccgccatcaaagaccgttttcccagctagttctggcaaataaccgatgattgcttcagctgacaattgctgcttgcgcttttcactatctaaagctgcgacaattcgtttgaaattttcttcattgtctaaattatggtgttcgtgagtatggtgtgacattttcatcatccttttccattttatattatagatattttatatcgctaattattctaaaaatgaagcattaaacttcattcaaagcgcagatagctggctgagcttcatcgagtcaaaatattcccacattttatcttcaccctcgttgataactttactgattggacaactatgctgattgttagccaaacagctgacttcatcgggaaagccatcgattgcatgaatgacatccaaaaaagaaatttccactgaattcttttttaaacgataaccgccttttacccctgaaaccgatgaaatcaaatttgcctttgctaattgggttaaaatttttgataaataggaaggtgaaacctcaaacttatccgctaagtcatgaatactcaaattactatctatctgatccttttgagcaaaatagaccatgacatgcagtcccatatttgcggctttggtaaacttcataacatttccctccatttcttattagagatattatttatctataatatatatttaaaataaatttgtcaactactatccaaagaaagtcctataggaaaaatctaccctcttcgaaatcagacggcagatttttttctttattttcttttcgcttctttaatgattttcaacgcacgtttacgcgttttgatattaggacttttcaaacggcgataggcacttgctagatcagccttctccattatttctacctccgtttaatgcgccagcatttcctgtgcaatttcctgacctgtcatgtttactggataataggttggccagttatcgagctcttcgtataaggctttttgactttctccaccaaaataaatatggaaatgagccgctttttctggtgcgatcccgtgatcactgaattgaacatacttgtagtttccagcattcggatcatcggtttcaaaagtgaaacgaacaccacgattgcctttttcatacgtcaaaatttcatatccagcatacttataggtatatttgtgatgtttcccgttaacgatgaaatccatctgcttaccagtaatcttgatttcatcaacatcggttttatacccagttttgtagtattctttatattctgctgctgttttatctttcttcagtttggctttgtaatcaaaaacttgatctaatgtacctttttccaataacggataaacggattgccattcaccggaataatcagataactttcggtcttttacttgagaatctttgaaatagccgttatagattgtctgctccgccgcagtttccttttcagtctttatttctttacccgcaacatccgtagttttctttaatgccttcaaattttctttcatgaccgatacgtagttttcacctgcatccatctgtttcttagttaagctttccagcggattgagcacctccaactgaacgtttgtttcatcagcaagtgtttgtgcggcttttccttgattattattttcgaaataaatatagttgatcccgttatcttcgacgtagtgtttcagctccgcaatacgtgaagggtcgggttcttgatctggattgatccccgaaattccaacctgattcaaaccgtagtctaaagctagatagctaaatgcagtatgctgtgtgacaaaattcttttgcttcgcctctttaagtgtatctgtatagtttttatctaggtcttcaagctttgctaaatagtttttagcgtttgtctcaaaaatcgcttttttctccggatacagtttgattaactgatttttgatcgaagtcacttctttgatcgcttgatgcggcgataaccatgtatgtggatctaactcatgatgatgaccttcttcatgactgtgatcatgttcttcctcaccacctggtagcaacagcatttccttggtgccttcaatgacattcggtttccctttcttccaagagtcgattgcacttggtacccaggtttccatattctcattgtgataaacaaacgcatccgcttctgtaatctttgccatgtctttggcggatggttcataatcatggggctccgttccggcgggtatcaacaaagaaacttctcctacatcaccaacgatatttttagtaaaatcatacattgggtaaaaagttgcgacaatttttaactgcttctctttatttttagactccgcttgactagcttctttgcaggcggctaaaccgacaagcgcaagtagactgatcagtagaatccctaatttctttttcatttcagacctctttctctcgtttaaatttttctcattgactatttaaataaaaaacacacttcacctctattccattatttggatcgaaacccttcaaaagaatcttaaaagaattaggtccctttccttgctaaccatcctcgctggaccattacaatttgcggatcacaaatcgtaacgattacgattcgacaacgatactttatcatccagtcaaaatagtgtcaagataaaataacatgaaattttattcatgtgaatggagaatcatttttcaacgaacggatgcaaaaaaaaaagcgattaaaatcaaacgattttaatcactgtcttctttatgctagttgctctttttcaaactgactattatacaaatcggcataaaaacctttttgcgccatcagttcttcgtgatttccttgttcaatgatatttccttctttcattaccagaatcagatccgcattgcggatcgttgataagcgatgggcaatcacaaaggaagtccgattactcatcaatttgtccattgcggcttgaattaattcttctgttcgcgtatcaacagagctagtagcttcatctagaatcaacatcggagcatccttgataagggctcgggcaatcgtcattaattgtttttgtcctaccgacaaactaacactatcatccaaatacgtatcatagccttttggaagtgttcgaataaaatgatcgatcccgactgccttacaggcatcaataactgtgtcatcagcaacatgctgttgattataaatcaaattttctttgatcgttccttcaaacatccatgtatcttgcagtaccatacaaaattgatcatgcacttcttctctagtcatgtctttcgtagagaccccatcgatcttgattactccgcgatttgtctcgtaaaatcgcatcagcagattaacgattgttgtcttcccagcaccggtcggtccaacgatggcgattttttgtcctgctttggcatctacactaaaattatgaatgattgtttggtctttattgtaaccaaagctgacattttcaaaacgaacatttccttccgcattttttaaatgagaaattttttctgactcatcggctaattcatcttcctctaaaaattcaaacacccgattcattgcggcccctgccgactgtaagtttgaaaaggcttgagctaactgggacaacggttgtgaaaataaacgaatataaacggtaaaggcgacgatgactcccagtgtgatatcgcctctcaaagccaaaacggctccgacaacacagacagccacgtacccaaagttaccgatgaagcccattaatggctgcatgatacctgaaagaaattgagccttccaaacactaccataaaaattccggttcatttcctcgaactcagtttttatatcctttgtggcactgtacgcattaataacttgttgtccagagtaagcttcttcagcaaagccatttatctcagccaatttttgctgttgctgattaaaatggacttgagattttgccataataaccgccatcagcacgaagcccaataaaacagcaacgactgaagtgatcgttaacagcaaatttgtccgaaacatcatgactaaacaaccgataaacaaggtgatggatggaaacaatgtacttaagctttgatttaacgactgactaactgtatccaagtcattcgtcacccggctcaaggtatctccttgactatgggaatcaaaatagttcaatggaactgcattgattttttcagatatctgacgtcgcatttgtttagaaaaacgttgcgtgacagtcgctacaatgaatccttgaaagtaggaaagaattgacccgatcccatataaaatgaccaatcctagaccaagctgactgattcgcgtgagattgattgaaccacctaagccttgtgtaatcaaatcagtgatttcacttaatcgattcggtccaacgatttgagtgatactgccaattgtcgcaaatacgatcgccacgagcagcggccatttatattggttcagagctttaaaaacattgtctctcaatggatgttccttcaccggtgtgtgagcattttctaaagtattatccatgtgctaattcctccttcgacagctgagaatacgcaatctcttgatagactgcatttgattccagtaattcttcatgggtcccctgcccaatgatatgtccttcatctaaaacgatgatttgatcggcatccatgatagtgctgatgcgttgcgccacaataagtttagtggtgtctgccaatttttcttttaaaacttctcgtaattttttatccgtcttataatccagtgccgagaaggaatcatcaaatagtaagatttctggtttacgggcgatcactcgcgcaattgccagacgctgcttttggcctcctgaaaaattactaccattttgcgcaacgtgactattcaatttgtcttccttttcattcacaaaatcactagcttgtgcgattgacaaggcttcttccatctttttttcatctaacggagcattgctgctgattccaaagtctaggttcgattggatcgtcccgctgaataaaacaggtttttgcggaatatatccgacaatgtcattcaaattcacatggctataagtattgatcggttgcccgtcaattgagatcgtgccttcactggtttcataaaagcgcggaatcaaattcaagatcgtactttttccgctcccggttgaaccgataaatgccacagtgtctccttgttctgctttaaaattgatgtcatgaacgactggctcagaagcatctgggtaacggaaggtcacatgatcaaactcaacagtccctttaatatctggctgctttttctcgccctcattcggaaattcaacagaggattccttatctaaaacctcattgatccgtttggccgaaatcgttgcccgtggcaaaatcatgaagatcatcgacatcaaaacaaaactcatgaccacctgcatcgcataggaagaaaacacgatcatatcactgaacaaggtcagcttcgccatccccgttgcttgctgaatcatatacgcgccgatccaataaactgctagtgttaaaccgctagagatcaagctcataccagggctcatcaaagccatcactcggccagcaaacaaattcgtcgaagttagctcttgatttgcctcttcaaatttttcttcctgataaccttcagcattgtacgcacgtaccactcgtagtccggttaaattttctcgtgtgatactatttaccttatctgtcaattgctggacttttcggaatcttggctgcacaagtgttaggatgactgacaacatgattaataagatcagaacggctacgccggtagttgtcgtccactgccaattcttgccagcgattttcaaaatcgcccaaactgctgtgatcggtcccttgatcagcaattgcaatcccatcgcaaccacctgttgaatttgcgttaaatcattcgtcgtccgtgtggtcaagctagggatcgaaaattgctgaatctcatgcgtagaataatccatcaccttgccaaacatgtcttggcgtacccggcaagttaaactcgccgcaattttggcagcgaacaaaccgacgatggatgaaaaaacaaagctcattaaagataataagaccatccagccgcctggttttaagatttcactgatagcggtattcggagtttgaagcagcgtcgtaatttgcgacatataatctggtacctttaagtccatccatacttgtccaaggatgaataggacactcgctagtaccagtagtctttctttcgtatttgttctttttattagttgtaccatagggaacctccttgttcgattctcgtcgtacatccgtctggaaaggatgtaaaaacggatagtgacatcttttaaaattagcatgctaaccatttgcgaaaaatgaaatctgaccgcttcaacggtcagattagagatgggatttcaaattttgtttgaatttttccatcgttgcggaaaactgagtcagttcttcatcagaaataccttgtttcaaaatgttttcgatattttcgatttgttgctctacttcgatcgtcgtctgaattgccttttccgtcacgatcaagcgcttcaaccgtttatccttttgagaaggcgcggtggtcaaaaaaccatttttgatcatgcgatccactagattactggcggttggcttccgaatcgataatttttcttccaaatctttttgataaatttctttgtcgcgattgtgaactaaatagcccaaagcaaagccttgaggccctctaatatgtccaccgttgctcattttttcaatatatctggcaattagcaatgatagttctctaacctcaaaaccaattgattcggactgactcatgggactctctccttaaatagttatcatgctaactattttaaattgttttttattttttgtcaacctatcttgtgccttcttttaaaaattattgttaacgcatcactgattaaggcacaaagaaagcaagcgatggttgcgataagtacttttttatcggcagaaatgtcacttaatttaaagaacaaatacagaatcaaggatgaccccgtcaaaattccgccaaataaacgattggaaaactgccagattcgtttgccatatttcaaaaaagcaatgccgcgaaaaccgatcccgccagtatagccctgtgaactaacaagcaggacaaccaaacctaaaacagttaataataaaagaaccgtctctacctccgttttttcaatgattcccacgatcattatttttcagccccctgatttttatataaagttcttcttttaaaatacattatagattatcgacttacaaaatacagcaaataaaaagagcaatcaaactgatcagaatcaatttgattaccctttttactaattattctgcctcatactctaaatcagacaccgccgattcttccttgctaaggcgtctgataccaatcgtataaagaattcccgtcaaaagcgctgcgcttgcatcagcaaaaggtgccgcatgcagcaagccatccattccccaagtgtttgaaaaaagtaaaattgctggaattaataaaataatttgacgagtcaatgttaagaaaatagccgaccgggttcttcctgtggcctgaaagaaattcgaagcgacaatttggaagccgataactggcaaacacaaaaaccatgtttgcaaggccttcgttccaaacgtcagaagttcaggctcattattgaatagcctcaccaactgttctggcatgatcctcgttgctaaccaaccaatacacacaatcgtcgtagcgaccgtgatcgcatatttttgcgcttcttttacccgaccaaatttttttgccccataattaaaactaacgatcggctgtgcaccttgaataagtccagtgatcggcatcaatagaatcgtttgaatactgttgacgattcccattccagataccgcaatatctccgccgtaggtcaataacgacatattcaaaacgacgttcaaaatgctatttcccaactgcaacagaaaactaggcattcccaaagtagtgatgcgcacagcgacacgccctttgattcgcatattcttaagtcgaatctgatgatggctgcgtttactaagtagataacttaaaatccaaaccattgaaataaactgtgacaagattgtagctaacgccgcgcctgccatccccatatcaaaaacatagataaagactggatcaagaatgatattgacgcctgcgcccataaacatcgtgatcatggctaatttaggttgtccatctgctcgtaaaaagttattcataccaatactaacaatctgaaaaacagcccctgaaaaaataatccgcatataactgatggcataaggaagaacgctattactagctccaaaagtcgtcagcatttgagataaaaacagatgccccatcagcataaataggagcccgctaattatcagtaaagaaaaggcatttcccattgcacgctcagcttcctctgtttttccggcacctagcttcatagaaaaaagcgtcgcacccccgacaccaaataaaataccaatcgataataaaataatcataatcggaaatccgattgtgattcccgccaaaccatttgctcccaagccaggtgcatgaccgatatagatccgatcaactacgttgtacaacgcattgactaccattccaatgattgctggaatagaaaattgcattaatagcttgggaattttttctgtccctaacggattcgctgcttccatttaatttcctccctttaaatcatgttgttcggttttctcgaccatctcctctaataattcaaaaagcagattacgcttagattcatccattccctctagcatgatcttattccaaccaacaaatttttcgaccatcgcttctcgcatatccagacccttttgtgtcatagaaattttattgcagcgtttgtccttttcatccttttcctttgtaaccagaccctttttaatcagtgattgaaccgtccgagccgtcagtgccttatctacttgcaagtaagtgctgatttcctcctgagtcactgcgttatgccgataaagatacatcaggatcggctgttctgccgtagtaatgttcaacggcttcatcgccgcattcaaataaatttgattttttcgatacaaaatcgaaatcaaccgtccgacacttcgtttcataataccctccgattcttttaaaaaacaatagttgactactcaactaatttaccaagaattagttgagtagtcaactattgttcaaaaagaaattttaataaatatgaaaagcgagcttttcccgtgttacacctgtaattggcagttggtaaacatgtaatggattcattttcgccacatatgcgatttgactaaatctcttgttcttttttgataaaagctacatctacagctcaccccttaacaaactgcaaaaagccaaactcgcagctagttcgtattaatggactaactttttcaaaaagcgaaaaagttaatcttattctcactgcgcatacgatttggctgaactacttgttcagtttttgataaaaaacgacatcttcatctcaaactttatatgctgcgaaaagccaaactcgcaactagctcaatagaacggtaaacatttttcgaaatacgcgaaaaatgctcttagtttcgtacgcatacgatttggctaaactacttgttcagtttttgataaaaaacgacatcttcatctcaaactttatatactgcgaaaagccaaactcgcaaaaaagcgattaaaaccagctggtcttaatcgccttgaatagattctttatgcacgctcagtattcgagctttttggtgtcttatcacccgttgatttcgctaaacctttaattgatccgcgaatgatcatggaagctgcaaaaccaaccaatgctaaaacagcgaatattcgcaaaacattcgtatatgaatggaacatttcagtgatcttccctaaaaaaatcggaccgaacatcccagccgctgcccaggcagttaagatatacccgtgaatcgcaccgacttcctttgaaccaaagacatcgccaatatatgcagggacaatcgaaaagcctgcaccataacaagtcatcaacaaacagatcaatgcggcaaacagcaatggcgagcttactactgataaacttaacaacacaacaatatcaatcacaaaaagaatcgtgaagacattcttacgtcccaagacatctgagatcaaggcccaaaccaaccggccgcacccattgaatacacccatcacaccgaccatcgtagccgccatgccagcagtcattccggtaatttcttgggccattggtgaagcttctgaaacaagcgagattccgcaagtaatatttaaaaatagcataaaccataatagccaaaaggtttttgttttaatcgcttgattggcggtcagttgcacgccgcgatattgaattttcacttcttcttttggattgggcgcttcaaagccttctggcgtccagccaactggcggtttttccaaataccgtgaagcggtgaacatcactaagaaatacgcaatccctaaaatataaaaagtcgaaggaacaccgacacgcaccatcaactgttgggcgatcggtccagtgatcatagaagcaaaaccaaatcccatgatggcaagtccagtagccaagccctttctatctgggaaccatcggatcatggttgatactggtgtaacatacccagctcctaaaccgattccgccaataatcccataagtcagatacaacattggcagcgaatgactagaaaccgcaaagccagtcgagataattcccaaaccgaataaaatcgaggcgaccgttcctgtctttcttgggccaaatttttctacaaatttccccataaatgccgctgatgttcctaaacagaaaatcgctaaactaaatgcaaaagagattgatgatttatcccacccggtcatctctttaattggttccttgaatacgctccacgcgtatgctgaaccgatagatagatgaatcgctacgcctgacaaagcgatcagccatctatttttttccctgcgcatcttttttcctcctattttccgctgatttatgtgtttgagtgtgacaaaaaatagataacaaacgttatctttttttgtttgaaaaatatttatttttagcactcaataaacacgagtatacgctctcatttcgttaaattcaactaatttttttatatattccgaatattgagattgtgttaaaaaaaagaattctatttaatttctgtatgtatctatccctatacagataaatgctcttataaaataaaattcttcacattcctcgcctatttccgctttaataaatttgactctttcttcactttttaaccttgaaaaaaagactatcaatcgaatttcccttgatagtccctagactcagaataaatcccttttctcactcttacttcttcattttttgaataggtacataaaataataccttacctacgcctgtgtactcttctaaattaaaatttccggcaatttgaaaatcttcactttgagccaattcaccgtagctgcgaccgatcagttgatccaactctacttggtctttatagtttaggttaaaacaggcatacgttcccgcaggcaattcaaactcagatggacgagtttctgtgatttcggtatttccaatcagataacattgttcaccatcgataactgcgtttacagctaacagattctcttcaacctttgaggcatattcttcttttgaccgcatcttctgtttactcatttctgccaatccattcgcagaattcggcgcattcaaagttgtaatccaaccgtaaactgtcacggcctctctttcaacagtcttaaacatgactagattccttctctctttgaagttctttccatttttcgctaaaaaaacagggagtcatccgttacacgctaaatatatagtcctaacctagtcaatgcaataaagatgcctgtagaaaccaacatcgtctgtttaaaaatgaatatagcccagcgcagccaggatcaagagtgttgtgcataaaattatgagaaacaacgtaaccagcaaaaacatactaacagtgtttttaaccgaaggagtcattacatccttcaggtttttaaagtggatcacacatacccagcccatagcgatcgttaacgacagctgaatcggaatgattccaaccagacttccgccattgatcgctgctacaaatccaacaaatgaaaaaagtagcagcgcaactgcacaaattacagaaaataaacccacttgaatcgactgcaacagctttgcctcttgctttatcttagccatatacttcacatcccctttcatcaaataatcaagagaaacttcataataatcactgatggcaactagcgttggaatgtcgggataatttttctcattctcccaattcgaaatcgtttggcgtgtcacgtgaaaaatttttgccgcctcttgctgtgtaagtccccgctcttttctttgcgcttttaaaatcttagcgatcatgatgatttctccttcctaacttgatgataggatttctaactaaattatactagaaagcaccacttacttattgtttttgtgacgcaagaactatttgacattgccaatttttgcaacaaacttctcttttcctgcaacaaacgaaaaaaagattctttctgctgacaatccttgctatgcttaagtcacagaagggggaaacatatgaacatcaactttacctgggtgaaagaaaaagccttaaacgaaattgacatttttgcgaatcctgaaaacagggccaaacttgaacgtcttgaaaaacagctgcaacaagaacaggaaattgtggcaattgatcccaaaaataaccgttcaatcaaattaccgctagaccaaatagtctcttttgaaactatggggcatttagtcaacgttcatttaatcaatcagcagaactatctcatgcaaaaacggcttaagaaattggttactttagagagtcaaaatttttatcgcattaataattcgcagattttaaatctaaactgtgttcaatccttccaattaggagagcacgcgcgtttagaagttcacaccaaaacagattctacttatattgtcagtcgtcactatgccaagaaaatcaaggaggaactatcatgttcaaacaattaaaaaataatttctttcaagcaggcttcggatcatttatttggatcactattctttgctcactcacggatttctcttcaaaaattccttttcattatatctggaatctcgttggaatcagcgttctaatcggccttttattcgggatcgtctatccttttttatggaactattcgacctttaaagcttcaatcaatgttgtcatctgtacagtgttaaatacgctttgcgcttatacaggcgtgtatctttattcgactcagatgtttgacctgatccgaccgttctttatcgccgtattgctgcttacattgattctgcatatcatcaccttttatttctactcaaaacacgataataaaaaaatggccgcagcattaaacaatctgaatgattaaaaaaatccctgactttgttttcaagtcagggatttttctatgcttttaaaatgttacgatcttatccgcccactccaccatttcaacacaatcaaacatcgttgaaattggacaggaggtttgatcctctaattgtcgagatttgaggcaagtgccgcaagccaatagctcgccgccttgctcttccaacttctgcatttccgctggcacattgtattgatcgtcttcaatactttcaacttccacggcttcccccataaggaaaaatttcacctgatgccctttcttcaaagccgctacaccaaatcgaaaagcgttccaagctttctcatgctctttggtttccaaaataatcgctaatttcatttcatccgctcctttagtcttatagtttatacagtggatatttctaccccaatcactttaaagtatagccttaaaaaaaactgaaaacaatccgctttttactataaaaataaaaggtaccagcacacgctgataccttcattcttttaacttatgaatagattagtctagaattttcgttacatcttcttgcatttttccttgcgcaaggatatttactcgagtttgcaactcttcatacattgaagcaaccgactgacgagactcgtttacttcttcagaaatctctttggcttgctcgttgatcatcgccaactctttcttcgcttcttctataatccgatatgcttccatcttggatttttctaccatgcgattggcttgttttcgtgctgaaatcaacacttcaccgatttcctgctgtgctgaaactgcttcttgttttaattgttcattttctgcacgaagctcggcaactttttctcttagatctaggagttctttttcttgaagctctttcgcttcttgttcttccgccatttggtccatcgcttggtctttttcaacgattaccttatctaattgagaatattcttcgtctttctcattgatctctgcaatcaattcatcgatctggccttccaattgatggattttttctagtcgttggatttcttcatctttttgctgggcaactagcgcttgatgttcttcgtgaatttcctccaactcctgttctacagtagctaaatgggctaccgaatcctttaatttttcattttctgctagagcttgttccaactgctgtctcaactgatccaattcttgtgtctctttcagtcgttgaacttcttgacgcgctcgttggacctctgcttctaaatcttggatttggcggcgattttgggccttttcttctcccatccttaatacagattgacgataattctcgttttctttggttaactgctgagtttgtgccgacatttcctttttatatttctgtaaaacttgttccttttcaaaaatcaaacgttttaactctttgatttcttccgcttgcttttctggagtctctggaattgtgttatcagaaaccatcttcaaagcgggagcaggcttcgcctgtgtttgcgcctgcgctgccggcggggtttgctcctcgttttcaactctctcttctggaacagaattgatctcatcgataatgttcttgttgaaaaaccatccgctctttttttgttgtgctaccatttttttcccttctttccgttagtcttcttcttgaatcattaaaaatttatcttctccattctcacgagagaaagtacagctataatcttgtttctgcttctccccatcccttacatttagctggaaggtgatctgtgttagattggatatcccctctgcttcagcagcaaaggctgtgatattgtctttaatttgttgacgattgtcttcactggtcaagtcaccagccaaggcaatattcaacgtttgagtcggtatatctaagacgatcaatgtcgtcggtaacccaaagtaaggactgagtttgctggaaagatcactctccattgcgtattgattttcacgactatcatcagaaaataattcgtcccacgcataatcctgcaagccgattccctcttgcgggtactctttgacaggcagcttattgactaatttcttttgttcctttttcattacttggacatcatctttcagtgtattgttctgctcattcatcgcatacagctgattttgtacctgaaacaggctgtatgtgcttagaagcattcccactgcgagacagaagattacgaataataacgccgatacatgctttgattgttgaatttgcttaacataatccaacttccgctgaaaagtcgccgatgcatctcttggtggcttaatcatctgcaatcgaacgttgataaccattcgatataaccacactaggagcactaaaatgatgagccctacacaaatccagttaatgattatcacgtattttccccttttcttttagtattccaatttagcgagatgaaccgctggaaaacggaattggacagttccttcgattgactttcgatggacaaaaccaaacgatcggctgtccttagaaacatctacatgatcgccaataacgaagtaaacatcttctggaattttgtttaacgtttgaaattcatctgctacagttggtgacaactgatacgtattcgttgtttcaaaatcaccttgttctccgagatctaaaaccattcggccatttcgaacaaacatactgtcacctggtaaaccaatcacccgtttgacaaacatcccctcttccttatccattgaaaaagcaataatatcgtaacgttgaacttgaacatttttttttaacgagaacttgatccttttccgtcaacgtcggaatcatcgaagtacctgaaatcgtgtggacactatagtgtttttttaattgtcctctcataacaagcagcatcgttacagatagaatgatgagaagaccagcagttaatagtaaggccctcctgtcattcgacggatcctctgcgtgcccgtgtcgcttatttgccatgagtgatggcacccctttattttgctttaatataagtaaccaaatctgatttcgctaagttcgaatcaatgactcgatatgaaatcaccgttcctccataaacattgccttctgagatcaaaattccctctggtcgaaccacttcaacaaaagcaacatgtccataacgcgggtctgagccagctgtgcctggtgtaaaggaaatcaaccagccagcttttggttcgcggctgacttcatagcctaatgcttttcctttggttccccattcaccgccgtttcccataaagtcatcgacgctcttgcctaattgtttcacgcggttaaaggcgtaccaagtacattgcccgactgggtacgaaccggaggtattgtaattgaccccgttataatccgggtagcgcatcatcgttcggtattcttcaggaatctcatcttttcccttaatgaaaatccctgaagactgatcaactttgacacgatcgtattgtgtcaggttgtagacagcaataatcgagtttagctttctattataagaagtatccgtagcatactttccagttaaggcctgtgtcgatcgtaaataattctttgcggtagagcgccacgtatctttatagtatccgtcattaccagagattccgccgcgtaataattgaacatagtctcctaatgaagcggcataattaggatactttcgaaaagccgaattaatcgaatacagctcgccattcccacggtcctcttgagtcgccattgaaacggcctgaccttgataagttccctttacaccgaatagattataatttggcggcaatgacaaactgctcgttccagaaccactttctaataaagcctgtgcgatcatcactgatgcaaagacgtcatattcttgtcccagcttacgtgcatcctccgcgatggttgaaataaaattcttcgctccttcattttcagtaaaattaatagaagcgggatattctgccaagattgtttgtccatattcagtcaattcaacggttggcaaagcttgaaccaataggtcttcatcaatactcattggttgaagaacgacctgtcgttgtttttcctttttatctgactcttcattctcagccttctccgtatcagtctctgtgccgtcatccttcgcagtttccgttgcttcatcagaatcatcgatttcaacatcttccactgtcagataatactcttttccaatatagacaccgactaattcaagctggtcgtttttcttttgatagagcagactgccgacactgatttcttcgcttgcttgttctggagttcctgtgatctcaatcgcaaacaaatcgctataaagcttagcggttaattgttccacattaaaatccttcgcctgttccgtcccaagctttttaataccgtcataaatcaaagcggcctgtgctttgttttcaaagcttgacagcaagggtagttcataaccttttaaatcggattgtgcaacttcagatgtcttcaactcacttggaagctgtaaagtactcgtctctgaaaaagcagctggcggctgttgaatagcatcagtatttgtttgaaccttaggctcacttggagccggaggtgccggggctggacttggaactggtcccggcgtagacggtgtactaggctgcggctgttcctgaccagaacttgacggtgtcgttgaagaactgctggtcgttcctgttgaactactagtagttgagctagtcgatccactaggtacactgctgctggaagacgatgactcacttggtgtagtagttgaactggacgtactagaggtctggctcgtcgaactctgacttgtcgaactctcactagatgtaccactacttgtggaactttcactagttgaactatcgcttttcggtggatctactgtgctgctttgtgtaggcatttctggtatggtatctgtcggtgcaggttctgccggctgctgttccacaggagtctctggtacagcagatacttccgatgctggtgcagctggcgctggtgtttcagtattcggctccgatgctttcggtacggattcaggttcaaccggtagaacggtagaactttcaggaactgtcgtctctacgacagaggattcttgaagtaaattatccgcttttagtgccccactttgcagactagcaactccccaacaaactactgctaccccacaaattaccataacaatctttttcatgaacatttccccttctttctatctcaaatcaagctaagtatttaataaaatactaggggcaaccaatgaatggaaaaaaatcaaggatgctgaaaataatccgcatccttgattcattcttcaataatgatgcatccacttaaattttccaatgaatgctaatcatctgccgccgctcatcgctaaacctttaaatagcaacttgataagtcacactatttcactgactcgcggcactttagcttctcctcgcataaggagagaagctaatcaacatgatccatgattgagtgcttatcaaccttcagcatgctgtcagtaataaaattacaatgaccggatctttatatgtattttttattttttgtatgaacttttatgagtgttatcgtttgctagtaatttgcatcaaatcccttgcattaacaccataaaaaagcgagaactccttcattgtacgcaccattggttacacatattattctacccgcatttataaggaatgtctcagccatttttgaaatataaaatttaatttttggataaaaataaggaatttgggtttttgaattcgcttacaaatttgtaatagcctaaatctagctaaatatgaaattattaagaatagcaaaacagaaaaaatctttttttgttttttctttttattttttgaataaataaagaaatatcgacttttaaagccgatatttctcttcgcctacgctgattctcgcttttttgtttgtaattttggaatcgttgaatgctcctgcaaaagctcagctaattccagtagatttttaatacaaagatccgccccatgctgataaaagatttccgctgtttgttggttcaaccgttccatttcttcttttgagagctgtttgtactcctctaaagaaagtcccatcactgagcttccctcagtgacagcgatactcaagacccctgcgttttttccttcttgaatatcagcgattgtatctcctactttaatcacttcttccatcgaatggttttgaaaatggcgcatattctcaaaaatcatgaatggatatggccgccccaatgaatcaacctcatctggtgttacgacataatcaggacgataaccttccatcgtggccgtgtttaatacaacagccatcatttctttggtatagccagtcgtagagccaatattatagcctaattgcttaatttttttcatcgcctgcttggtttccggttttaaatgactgttctctgcgagatctgcaaacaagtatttctcaaaatcctgatagatacttagcacatctttctcttcagaaagacgtccataaagctcaaaccattgcttttttacttgctcaagcgaaagcagctgtttgatatgctcaattttaagcatccccatcggttttctgatttcttcattggaaagctcgatgttcttatttctaaatgcttttttgaaagcatgaaccggtgccatacagccgaaatcgactgttgtcccagcccagtctaaaataattgttttaactgacatatgctacctccgagtaattttcaattactttgactaactgatcaatatcttctggataaatctcaccgatatttccaatgcggaaacaatcgacggaacttatttttcctggatagatcacaaagccattttgtttcaaatgctgataaaaatggtcgaagttaaaggcactctgcttgggatataaaaatgaagtgataaatggcccttgatgctgcttgatgaagggctgatagcccaattcactcattttttgccgtagcagtcgattatttgttaaatagcgcatatagcgttggtagattccgccttctgcatctagctcttttaaagcttgatgaaaggctaaaaccgtgtgggtgggtgaagtaaagcgccacttgccgtccttttccatcgtttcatactgatcataaagatctaaagacaccgttcgtgaaaactctttacgttgctcaagctgtgcccgtttggccaacgtaaaggaaaagcctggtactccttgaatacatttgttcgagcttgagactagaaaatcgatggacaatgccgtaacatcaattggaattcccccaaagctagacattgcgtccacgataaacagcagctcattgtctttggcaagtgcagcaatttcttctaactcatttaaaataccagaagtcgtctcactgtgaaccatcgcaagcgcagaaatggttggatcattcacgagaatgctttttatgtccgttgcttgcggaatttcatcttctgcgacttcataaacgctgtaagccaaatgatgccgttcgcacatgctgaccattcgacgcccgtaagcgccattcacacaaacgagcacatgatccgtcggtccgatcaccgagcttagaactgattccacaccaaatgatccgcttccctgcattaagatcgtcgtatattctactggggaggcacctgctaaagacaatagcttttgtcgaatttcctgagtaatcgttttatattcttcatcccatgtacaatgatccaccatcattgcttgcttaaccgtctgagtcgtcgttaacggtccgggtgtcaataatttgtagtccatgctaagctccttaatcgattaatttttggtgctgctctaataattctgcggttaattctgttggaaagactttttggtcattcgctacgtgtgcgctatctacctgctcatccttgtacagtgcgcttggatagatttccaatatgtctttacgacccttttccaaaatcaaatccagcattttttctgcttcaggataggttttgtcgcctttattaatcaccgccaaagattcagttaatgtatacgttccttctgagggttcaacaaaatcaatcggcaatccatcctgtttatctttgactgcctgatgtcgtaacccaaatccgatcgcaacctcacctagccgaacctttttcaacggacctgaaccagaactttctaaatgatcccctgcatttttgtagatccccttcaagatcgttttcgcttcatcttctccgtaattatcaactaacgcttggaacagcagccacgctgtagacgattgtttgatatctgagattgacaaggcatccttgtatttcggatcggctaaatctttcaaactagttggaattggtaagttcatttccttcatgacatcggtattatagaaaattgttccttcttgaacggtaaaaggtgccgtgtaatccggaattttcgttaacgattcgactggaagcgttaattctttaaacatcttgtcttttttctgagcactatttaaatagaaggtactcatcgtgactaaatccgcttcaatattttttccttccgctaagagctttccgcctagctcagaagtgccgaatgattgcagcgtgtatttgcccttgtaaccgtttttgtctaaaacattcttgattacctccaccggttcttcgtcagcgttagtataaatcgtgactttctcgtcagccgcattacttttgctacaagcgcctaataatagaaggaaaagcaagcttccaagcagtgcgagtagtttttttctgttcattcatcattctcctttttcatattaatggattaatttttcttgagaaaaattagtccgattttcaagccgtataccattcctttatactttgtttctttgaatagcagttaattttgtaggcagctttttaccagctgtctgactgggaaaagtggaactggcaatccttttaataatttgagtaattccttgcataactaaattaattactagtaaaaacagcgagagcataaatatatcgttaaatcggccaaaatgctgaagctcttttaatttggcggtaataaccatcgtattggcacttgttaagaaaatgaccgcactgattgtgaccatcgaattgaaaaagtaatacgcgaagatatctataattgtcacctttgaattcgggatcagaattcgccaaactgtttttaaccagctatctcccatcaacttggcagtgttctcccagttcaagttcatcttttgcagtgcctctttcgccatctgatacggtgttgaaaaataatggacgaccgtcacaatcactaagattagtaatgtattgtgcagctgactgccactgaatagcaataagtaggccactcccaaaaccatcccgggaattgaattcgtaatggtggcgatactatcaattacttgattgaccttataaagcttccgctctctggaggtcaatatcgccgccgaataggcaataattgtcccaactcccgccgtcagcaaagccatcagcagtgaatttttcaaggttaaaatcaagctgtcatcttggataaagcgggcgaaattattgaaggttggggtcaattcatagggccaattgctcaccattggaataatgatcaagaccgcgaatactcctaaaatgaaaagagagatgctgatgaaaagtagtcgaaaacaccaatctcttaccggattctttttgatcactgcctgccgtggacgctcatagcgcaccaccttcttctgtaaatagttcaaaaccaaaatactgatgattgatggcaatagcatcgttaaagccactaatgagccaaactggaaatctggaatggttcccatgaatccttcatataataatgtcgtgatgaacggggtttgtcctcctaccgcgctgggaatcccaaaatctgtaaaggacataaaaaagccctgtagaaaagccaccgccaacacgcgcgtcaatggattcaagatcgttttataaagcgaccgataccagctatcccccatcaggcgtgaaacaatgaatagctgagtatctaaatatttcatcgaattgttgatcaaaatgaagattggtggcaatgtataaatgatgaatcccaataaaataccgatggaaccatagatatggaacagttcctgttgaaaaactttgctccacaatccctgcttgccaaaggcataaataaggacaaatccgtaagtaatcgttggtaatagcatcggaaaatgcaaaacactttcatttacctttaaaaatcgccgattgattcgagtaaaattatttccataggccaagaaaaagcctaaaattgttgaacagctcgtagccgctaaagaatatttcaagctgttagcaaatgatcgctgccattctggagtgaaaatatccaagctgctcccgtcggatcgtgggaaagctgttaacacgatttgaatgatcggataagctaaaaataaaaagaagaagatcagcacactccagctaatcactcgtttcaatgaaaaagccgctctcatgaggccaccatattgactgattgctgaaagatttgctgaatgttctgttgcttgattgccaattgattgacaataaactcctcaacaaaatgacaggaagcctgactcataatttcgatcggtgaactgcattgagcaattttcccttcatctaaaacaacgatcttgtctgacatcgtcaaggcctcttccggatcgtgcgtaacaatgatgatcgtcaaatgtagcttacgggcaatttcttggattttttctttgattggttccttgattactccatccaaggcactcaacggctcatccaacaaaagcagctgcggcttcatcactaatgtccggccaagtgcaacccgctgcttttgtccgcctgacaattgatgaattggtttttctaggtgcttttccagattcaacaattgaatcagctcgtctacctccgctttggtggagcactcttttttattgcgtagtccgtaggtcaaattttgataagccgtcaaattaggaaacaaggcataatcctgaaaaacaatattgaagggacgtttttccatcaatgtatgggtgatcttctgattattgaagaaaatttctcccccacttggctcatccaatcctaaaatcagatttaatagcgtcgtttttcctgaacctgattgccccaggattgaaacgatctcaccagactcaatttctaaattgatcccatccagtactgtcgtctcctgaaatttcttcgtgatattctcaagttttagcacctgatccactccttctttcgtttaccattcttttatgctcttaggtgattttctagcgagtttaacttttgcttgctcattgtaagctgactttctctaataaaaagtatagcgaaggagtgtaaaggcaccgtcaagttcctgcaaagataaaataaagattgttgtttttatgtaaagaacgtaaatttttgtgtataaacaacagaaaattacatctgccactacttaaatagagaagtaaattatttacagctcaaaaacgttgcacccgcaacgtttttcttctatactgtactgtgcttgtttaaacgcgaattcgtaactaccaagcctgcaaataaaaagtcaagcaaaaaattggaaagagagctatctggattgaaggcatgacaaatagaaccaccgataatcgctggtttcaacttatgctctcaaaaacaaaaatcattcctcttctgaaagtgaagccagatactcttttactcgaccgtaatatatacgcaaaaacttattcgcaccagcagtcatgtaaacatagtacggttttccttctgctcgtttcttagaaagaaatgcgtaaactggatcattttcgggtgatgttttcactaaaacgtccattacttgaaacagtgatttacgcagttgagcagatccacgtttagaagttcgtacacttttctgattataggtgctggattgattgacacctggatcaacccctgcaaaagcagtcaaggcgcctcgacgtgaaaagcggcgaacatcgccaatctctgccatgatctgtggacctaaagaaggacctacacctttcatagccataactacaggatattctggtaattgtgcagctgtttgatccatctgtaggcgtaactgctcaatagtcctagaaagagtgtttaactgttcaattgcttgcataattaagtttttggtcattttgtctttaggtaaaagagcaatcaactctttagaggcttcgaaaatttgcgctggtttatctggatggaagtcgtaacctttacgcacacagaacttccgataacgttcagtgaacacactcaaagagaccttgcgaacacaatcgacgtgccaaaaagaggcgacaaaatcaacccatttctggctgccatcttttcgaacaggactggtgaaaaaagtattcgctccaggaaaggtttgatccaaaagagcaatgagattatttttaagagcggtcttatgtttcatgtaaaaatcaaactgtcggttcatggtttttagttgatctcttgtcttgtccataaagcaatactgtcgtaggtcattccagttgtcaagagcgtaacgagcaattttgagtgcatcttttttgtcagatttcactttacgaagagaattgtttccaaaatctttaatgagttttggattgaccacactgacataaaaatccgcatccgagagccaacgagcaatgggttcgtgatagcgtccagtgtattccaagacgattctaacttctccttctaggtttgaaagagaatgaatgaagtcgtcgatggcactagaagtatgacagagttcaaagggactagagatcacttcaccgaaaggtcggagaatcgaaacaacacttttacctttagcaacatcaatacctactgcgttcaagacaatcagctccttcagttttgtcgcaatggaaagccagcgtaaacacattgccgattcaatctactggggtgtgacacgaacgtactggtaaacagcagttcaacctgcataaaacgaacgctgtgaatgagcagctggttggcagacttaatcacggacgcaaagtccaaggaggaatatgcccgaccattgccctctcattttaacagcttaagcaacatgatagataaaagggattactaatgggattagtagtaccttataacctataaatatattgtagtaggaggaataattaggtggattcttttgtaaaaatgatcaatcgtattgcgcggctttctgctttgtatcgcgaaaaagaatttaagaaattgggcttaggggaaatgcatcacacctacatcttaagtatttgttacgagccgggaatttcacaagaagccttggcctgcaaaatctttatcaataaaagcaatgtcgctcgccaattggcacaactggagcaaaaaggcttcattacgagacaaaacgatgagaaagacgcacgtcgtttacgaatcttccccacagataaagctttggcaatcgaagcagaaatccgttcgatcctagcagactggaatcaaaagctgttagcggagattccgactgaacagcaacagaacttattgtccgaattgcaaacgatcgtagagaaagccgaaacagaaatgtgtaaaaaggagtaaacatgaaattaattcttaattatttaaaaccctaccgttctcgtgtcacgttaggtgttatcatcaaatttttggggaccatgatggaattggttcttccatggaatttggcctatattctagatcatgtgattccgcaaaaagatcccaagaaaattctcttttggggcggtgtgatgttggcagcttccgatttttccttatgggcgaatatcgtcgctaaccgcatggtctcacggatcgcaaaagatacgacagaaaacattcgcggcgatctatttcaaaaaatcacctatctagacacgacccagattgaagatgtgggggtctcttcattagtttcacgtgtaacatcggacacctacaatattcatttgacccttggtgttatgctgcgtatgggaattcgcgcgccgatccttttggccggaggaatcttgattactactaccttagatccgattttgactttagttttagtggcagtgatgccgatcatctttgtaatggtgacgcatatctcgaaaaagggcgtgcccttatttggaaaattgcaaaagcaagttgatcaacttgtgttgacggtgcgggaaaatgtaacaggctctcgcgtgattaaagctttatcaaaagaagcctacgaacgccagcgctttgaaaacgtcaatcaatcgttggtcaatgcggaaacaactgccaatgtaacgttggctgcttctcctgcgttgttggatttatttttgaatttaggtttgaccctagtgattgtcgttagcgcctatcgtgtaaacgctggattgacacagccaggagtgatcgttgccttcttgacctatttcacgattatcctgaacgcgatgctttctatcacccgcatctttgtcctgtattcccgtggtctggcttcggcgaatcggatcaatgaagtcttacggaaaaaaccttcattagtaccaggatcattgaatcaaagaaaagctgcttctactaaactggtctttgatgatgtgactttttcttatcctgacggcggtcatgcgatcgaacacatcagcttcagcgtaaatcctggtgaaacattagggattatgggcgcgaccggcagcgggaaaaccacgatcgccagtctgattttacgtctatacgatcgaactgccggtcagatagtattagacggacaagagatcaaacattattctcttgatgcactgcatcaaaaaatcggtgctgtcctgcaaaaggacgtactctttgccgatacgattcgagaaaatattttgttcggtcgtaacttttcagaagagcaactccagcaagccatcgatgatgcacaagctcgagaatttatcgacaaacttgctgatggtctggagcaccgcttggaagcaaaaggacaaaatctcagtggtgggcagaaacaacgcgtgctcttggctcgtgctttgattgggcagcctgatctgctgatcctagacgattcttctagcgcgctggattatcataccgatgcgaatctacgaagggctttgcgaacacatttcggtgataccaccaagattttgatcgctcagcgaatcagttcgatccaacatgcggataaaattctactattaaataaagggaaaatgattggttatggcactcatgaagagttactaactgaaaatccaacctatcaagaaatctatcagggacagacaggagggcaagccattgaagaatagaggctcacgcaaaggtacactgctgcgtttatggggatatttgtatcaattcaaatggctgctgtttttagctgtcgtcttgacgattgccagtaacctatttgctttagtcggtcccctattgtctgggtacgcgattgatgcgatccagactggcaaaggcaatgtcgcctttcaaaaagttttcttctattgtagttggatggtagttttctatgcggcttccgcaattttaagctacgggatcaaacgattgatgatctttctgagtcaaaaaatcgcgtttcgtttacggaaagatttgtttgagaaaatcgtttcgttgcccgttggttattttgaccagcaccaaaccggtgacatcgtcagtcggatgagctacgatatcgatacgattaacacttcattggccagtgactccgttcaggttttgagtagtctggtcacggttatcggctcctttgttatgatgctggtaatctcgccagtgatggtgacgatctttttagttactgttcccgcgtcgattttattgacccgttacttaaccaataagttccagcctttgtttagacaacgttctgccaagcttggtgaattaaatggtctgactgaagaactgctatccggtgaacaaaccaccaaggtctatcatcaagagaaaacaacgatcacccgctttggcaagaagaatgaagaagccatgactgcttattacaatgcagaatattacggcagtatgactggtccttctgtcaacttcataaataatgtttcattgtcattgatcagtatcttaggtgcctttttattcctgtttggtcacttaacattaggaaagctttcctcatttgtattgtattcacgaaaattctccggtccgatcaatgaattagcaaatattttcagtgacctgcaatcgtctattgccgcggctgaacgaatcttcaaactattagatgaagaccctgaagttcaagacgtaaaaaatgctcatgtctttgaaaaagttcatggagacgtacgctttgaccatgtttccttcggctatcaagcagatcaaccggtcatcaaagatttatcctttgatatttctgccggtagcgttgttgccattgttggtcctaccggtgccggaaaaaccacaatcgtgaatttgctgatgcgtttttatgatccggatagcggtgcaatctacttggatggacaaaatatcaaagaagcgactcgcagcagtctgcgaaagcaatatgcgatggtcctacaggatacttggctctttacgggaacgatttttgagaatctgacctatggaaatgaagatgccacgttagaagaagtgatcaaagcgacaaaagccgctcacattcacgatttcattgcacaactgccaaagggctacgacacggtgatgaccgaagacggtttagcaatctcacaaggacaaaagcaattactgacaattgcccgggcaatgcttttgaatgccgaattattgattctcgatgaagcaacgtcgaatgttgatacacagaccgaattgcagattcaagaagcgatgggtcgtttaatggtgaacaaaacctccttcatcattgctcaccgcctctcgaccattcgtgaagctgacttgatcttagtcgtcaatgatggcaatattgtcgaacaaggcaatcatgaagagctgctagctaaacaaggacgctattatcaactgcatcaagcccaattcgaaaattaaaaagactagagtctccacgattttttcgtgggtgctctagtcttattttttattttcggcaatttgctgaaccgcctctacaaagcgttctggttcgttgatccaaggattgtggccggagtgttcaaaccaaatgatttccttgttgggagcgtccaatttttgatagtaatcttcagttaagctaagtggcgcattgatatcgtgcttccctaatagaaaatagacgggaacatctaatgttgagtactccttccgcaaatctacattgtacagttgcggatacacatgattgaaggtttgcagaatgcctcgcagataattgaccttatccaagatgccatactctttcgccgcaagatcccgcatcgtttggaagccgccattttgaatctcaggatttcctgccatcttttgactgagatagttgagataggtcgcgcttttggtggtaacagaatttccgtgataaggcggttcgccattttttcttagcgtatccacgaccttttgatctccattctcttttgccagcttcatcgccagcgcgtaatcgattttctccgtttcttcaaaggctaccatttgtccggtgcctataaaggtatggtaaagccccggttgttcttttaccataaaaattcctagtgcactcccccacgattctcctagcagataaagcttttcctgtttgaactcttttaacaacgaacgaaccaaagccgttccatcttcaacgtaaatttcaggggccaactttttccgcgggatcgctgagtaggattttcccgaaccaggctgttcccagttaactacgataaaatccttttctaattttgcaagttcataacgtgtagctgccagctgtgatccccccggaccgcccgctaaaaatagaagtactggcttgctgcggtcttctcctcgaatgctgatccattccttacgaccattcaattcaaccttccgcaactctgcgatactattctccttagcgattttcggtgtcgatgccgtcagctgagtgaacattattaagacaattcctaaaaccagaactatcaacatccctaacaaacttcttctcactccttttgttgcaaataggacctgtcttccgcgaaatcgattaaacaaataaagcacccctttgatcagtaatcctacactgaacaaaacaagtactaacacactgatgataaatacacctaacactaacaaaataactcctccttcgtttttgaccatcgttcaacaatttcatcataacaactttttgaacgatggtcaacttaatatgctatactatttttggaggtcgatgtgatgagtaaacgagagttaattttagatgccttgcaggaactgctttacgaaggaactgccggtactgcttctgttcaggatattgccacaaaagcggggatcgcaaaaggtggtctctactattattacaaaagtaaagaggaagtcttagatgccttagttgaacgccaatacaatcacgtgattgaaacctgtcggataaaattagccactgtcgaggctccggccttagaaaaaataaagctcttactgtatttttatcgcaacaccgctgtcgatcaaacagttgatagtgcgttgcacgaaccgcaaaatgccgcaatccatcagaaatcaatggcctttatcatgggacgtctggcgccaatcgttggtgaaattttgcagcaaggagtcgaagaaaacgtctttgtctgtgaacatcccgaacagctagcggaaattttactgtcgccgattatttttttactcgatcccgggttatttacttggaccgatcaagaagtacaaatgaagctaacggctttagcacgaatgctagaggctagtcttcaggctccgatcaattcatttgcttttttgtatgagaattggacaactcagcggttaaataaaaaaagttgaaggcagttcagaattatctgccttcaactttttaactattcaacatgttttcaaccatttcttttccgagaaaggtcttctcacctagttcctccacagtcattccatcagcagccaagcgcttcaccatgaccgtcagatcttctccgacttggattacatgcttatctggatcataaaagcacgcaaccttttgcccccactccatcgtagcgatgtctcgtaaaaaatctaactcttcttcctttgtccgctcgataaacccatcaaagtccttcgtttcaaaatagaactctaccgtattattctgatagttgaatgactctttctcacagccggtaaatcgaatccacgattcctccgtttgtaatgacaagccgccattgaaggtcacattctcgccaaaatcagaaacgatatccacctctaaaaatttacgatagaatgcttttgaccgctccatatccttcactactagcataggtccccgatattccatcacattcctccattcttttaaaccgtttacattattgtatactatatcacaaaagaccggcttactgcttctgtataaacaaaaaatcttgaagcttttccagctccaagatttttatcgttagtttacttctgcataactaagctttttaccagtcatttcctcataatccttaaccatgatttcccaagctttagcgatatcttcgtctaaaccaaagagtccgctgcgaccaacgatgtaaatatctggcccggctgcatcaatccgtttgaaagatttacggttagaggaaccatccatttcgatcacgtaatcgtagcctttttcttcacgtaattcgcggagagccacgattttatctaaggtgctttcaataaagcgttggccagcaaagcccggatcaatcgtcataatcgtgatcttatcaaccagctcgatataagggaaaatcgtttcaatcggtgtttcaggattcaacacgatcccagccttcaaaccggcgtcgtgaatttgatcaatcaaacgaaaggctaaaccatctaacacctctgcatgcatacagatccactcacactgcaaatctactagctgctgtacccaaaaacttgggtctgtcaccatcagatgcgccgacatcggcaacgtggtgattttccgcaattcttcaatgaaccaaggagataaggtaatgttcggcacataatgcccgtccataatatcaatatgataggaatctaccttgtcattcaaaaaggtgatttgttctttaaacttatctaagtccatcgtcattagtgatggggaaaattctacttttttcatgtgtcgccactctttccggattaaaagatttgaatatcttctaggttgatgtcctcttcttctttttcaacctgcatcgctgcatcttcttctgtcacatttttcttaattacggctaagacaactgctgttacgaccacgttgactaaaatcgcaatcacacctgcccatggtctcgacattgtcggaatcatcagcacaccaccaaacggtactgtcgcatctgcgcctaagatcattgttgttgcgccaccagcaaaaccaccgatagctgttgctacaacaccccgcacgatgtcgttcataactaacggaatgaccccttcaacgatattgatcacacccattggaaccgctgacttcaaggtttcaacttctaatttcgtgtagatatttttgccaaataattttgcgatgaagaaggctaaaccaaatccaattggtgttgctgtattcactaactgtaaagcagtaatcggaccgttcaatccttctgcttgcatcgtcaatacaaaagcgaaaaccgttttgttgatcggaccgccatagtcaacaccacttaacagaccgatcacaccgccaaatactaataacgaagaattgcctaaaccatccaagaagtttgttaataatgatgttaacgctgcaattggtgccccaatgatatagaccatgatcaacccgccgatgatcgaggttaagaagggaatgatcagtgttggcattaacccttttgcccaattcggtaatttcacatattttaaaattgctaatactagataacctgctaagtaaccgcctaagattccgccgataaaaccagcgccgatggcatttgctgtcaaaccaatgatgaacccaggagcgatccctggtttgccgccgattgaataggagatacccgtcgcaatcacgactggcagtaagcctaagcctttaccgcccatcgttgccaacgcatcccaaattgtaaattccccttgaaccaatgcatcctgacttgaaccgccaaaggccattccgatggcgattaagaagccggcaccacagacgatcggaatcaaataagagatcgccgtcaataagtgtcctttaagatttaactctttaatttttttcatttttcttcctccatttaactaagcgaatgcttcaacaacatcttctggctttttcgcctgcaacagattgccaaccacttcatcgttgcctagctttctggcaaacagcgacaataatttcaaatgattggtcgctccgtcattgtcattacccaccgcaaagagaatgatccccttcacgcctttgccatctaaactttcccaaggaatttcctcttgattgatcccgatcgctacgccgaccttgttgacataggcgctttttccatgagggatcgcgatataatttccgatacccgtttggccttccgcctctcgtgcgtaaatgtctttgataaacccttctacttcagagatatagccattcctcagtaactgattcgctagatcgttcaaggcatcatccttggtcttagcggccatattggttttgacgatgtctaaatccacaatgtcctttacttccatctaaattccccctaaaccttttgagcaacaacctcttgggctttttcaatcaatttatttggtgacttaacggcgatttctgtcggtacttgaatgattcgtttgccgtcaaaacgttctctgccggaaatctttacatcgattgccaagattacgatatccgcttgatcaatctcttcttgggttaattcattttcgatcccaatcgtaccttgcgtctctactttcatttcacaacccgctttttttgcggcattttctaatttttcttgtgcaatgtaggtatgggcaatccccactgtacatgctgctactccaacgattttcatcatttattcctcctataaaatatggtaaattgccgtttcattttcaaggcttagtaattgttcgataaaatcatcatctgctaagcgccgtgtgaattgggcaattttcttcttcattacttgactctcattgctcttcaatagaatagtaattatcagctggactgctgatgtcttctcgtcaaaatcaatcggttctgctaaacggatcagtaggacctgactttgtttgatcttcgggctttctaaatgcggcaagattacatgctccgcgatcatggtattcccgactttttcccgctgctgcaacagatcaatcaattcttccgactcagccgaattagcgaactctgcaataaaacgttgcacatgtgctttgtctttaaatggctggtccaagaaaacttggaaaaaattatcgttcatcataaatcgcctcgattttcttttgtagtcgggtttgatcatctcgtgtgaacatcgcattgactaacaaggatgggatagggatcatatcgctgacactgattgtggttaaaatcaaatcgatgcctggatatttttccgtaaaatgctttgcatcccttgaagctacgacatcaacaatctccaactcaggaaatttcttttcgatcttgactcgcagcagctctgaagtaccgacacctgtcgtacacatgatcaccgtacgaattggtaattggttcgtttcaatgatccgtgcgaaatacaaagtgataaagccattctcgtcttcgttgatcttcggcagttcaaaatgctgactcacctcatcagaaacatcactgacatctgaaaagatggattcataggtcattttaatctgatccaacagactattttttacatgaatcccatgttccaagcgattaagcataggcttgatgtgattcgctaaatcaagaaagatcgaatcgcctttcgccgagatattcagccgctgactcatgctatccagataagtattggtgatttccacgacctttgaagaaaattttgttactttacttaacgatccttgcatccgcgatgaagctaagtattgataaagataataaacctctgattctggcagctcgttgtgcaaatacttttcaacatttttaatcgcggacttagcgacctgataaagcgccttgtcttgctccaaacgttcctgttcctttttagaaagcggactcatttcttcgttcggaagtctatggaccttgcgcaaacggctgattaaaatatacaaatgagaaaaaatattgacattatagggatacgggatcgttaattgcaattgcttttcaatcaacttcagctggtctaagataaacagcacatcataattattgaagttcagttctgaatgattctttaaatcatcgatttcaatgatattgtgcacctgaatcaaatcagcaatcgctcgccgcagattcgcctctttccctaaaattgccaacgtccgctgcttgcgttccaatttcaactcgtaacgctgcaggtgttcagcgatcacttgctcatcactgaaaatgacggactcgccaacataataatcttcaaacaggtcgtaaacatttttcgcattcggcgatgatagcagtagttcctccatcacacgatttctacgctcctgaggagaatattgactgcgctgactgggttgaatgtttgcttggctgatatatttttcgtagtttaatttgtagcctcgccccttttctgactggatcaagccctcaccatgtgtttcattgatttttttgattaggcgataaattgtttttggcgaagtttctagatgctccgccaattcctcggacgtgatataatcatgtcgtttcgttagaagtagtaacagccgttgttcacgatttttctttgctcccatggctatcaacctccccttcttgtttttatcataacctgtcagaaagaaaacgcttcactcgtttttgaccgttgcaacggacaaaaaataaagcgtctcacgtttattatagtcaggaagcactcctaaagcagaaaatattcgaatccttcacaaaaattatccgcgttcgtccgcatatccagaaaaaaggcttcacggattctttttaaagccagactcacagtagtatcctagttaaaggctagcgaaaaaaaacgtgaggaatcccctcacgttttcttcaatcctattcacttaccagccaccagaagcgccaccgccgccggatgaaccgccgccgaaggacccccatgaggagccaccacctgatccgctattattattatcggaccaattatcagagttataattcgatgctagataagccgttgtcaggatatcgccgttaccagagtataacgtatcgccgattaatatccgaccgaacattttcttttctgcagaaggatttcgcaacaatcttccttgaacgatcgcacgattgacaccttttactgacattccaatcagcaaaccgcttaataaaatgtggtagagttccgtatgtttaacaacccgttgcatctcatcgtcaccagtaatcgaagtagtttccgtttgatactttttatagttttctttgagaaaaacacgagccctcaataaatttactactaataatagactgacaaagaccagcaagcctaaaactactactcctgtccagtggaagaacatcaattttgtccgctgactttcgacgtttttaatttgcgaatccactaaagccgtcttcgtattcataattccgaatacttcatccacaacctggctgacccctgtatcgtaatcctcatccttgaaggcatccactacatcatcattattaataatgtcatcggctttaccatcaggaatcagaccttctaaaccatagccaacttctaaacgaaattctcgttcgtccaaggcgattaaatataaaacaccattgtcttcattcctatccccaatacctaattggttgaagatcttattggcatacgattcaatatcttctccacggggcaattccgggatcgtaaccacttctaattgcgcaccattggtacttgctgctaattgtttgtttagttgataaattttttccttcattttctgactcagcatattagcgttgtcagaaacaaagatattgttcttattaatggtcaaatgaccatccgtttcttcaattgccacatcgtagttgttggctttcttcggatattctttcaagttagccaaattatcatttagagctgttttgaaagatttgttaactgtcacttttttaccagacaaaatgtcttctcgttcctgattcaacttcgtcaattgctgatcataggacacctttttatctccatagccattactcgtaaagagattaaataagccgaacccgctgactagcaatacaacaattaaaattagggaaaagactccattacgtttacgtaccttgcgatagttctcaacaacctcctgatggagccgttcccctgaagcacgctgttccctcttcattttttctcacccattcttattcaaaactgacgtctgggacttctttcgcaccttcatcagccttaaagttcgcctttttatcaaatcctaataccttcgctgccatatttctagggaatcgaaccaagctttggttatagtcattgacttgttcgatatagtttttccgttcaacagagattcgattttctgtaccctctagctggaccatcaaggtttttacattttcattagaagctagtgttggatagctttcttgaatcacgttcaccatcgtacctaagctttgatcaatttgattgtttgcgtcatttttttccgatggtgtcttggcattgttgtatgccttccgtgcatcagtaatttctttaacgagcttttcttcatggttcatactacctttgacactgtttactaaatttggaatcaaatctgcccggcgttgcatcacattttccacctgcgaccattttgcgtccacatcgttttctgctgaagccaatgagttatatgtcgttaccaagtatgctccgattgccagagcgatcacgacaatcccaacaatgatacctgaacctcttcgtttcatttttatcccaacctttttctgatttatttgttatttgtgattgagctaattatagcattcgggtaggggcgcgcctcagactttcgactgattttttagctcaacggttgacaaaaaatcctcccgattttttccttcatatatagtacgagaaaaagtatttaagctttttctttaaagccttcgaaagcgtttgatttttagttaagatacactggtcgggcttcgatatatcctcgatacccctgtggttctaattgaatccgtggtccctctttttctgcccattgacaattatttatactaggatcatatgtatcgatctgctccatcactgcttcaattgcttcatcaaaacgtacttcatcatacggatcaccttgaaatagcagcatcgtacaagcagacagttcaattacatcaaagccctctggaataagcccttgataatcaagcgggacttctacaccttgagcataaacggatgtttcttccgttcgcatgctttccggtagccaaagtcctactggttcatacaatgcctctttgatactggcaagaattccccagacatcacaaccgacttcctgtgcatattcgatataggttttagctttcttgccccgcaataaaatcagcttacgagcgggaaactcaatgagtcgaacatgtagattcttcgataatggcggtaaatcactgcgttcctcgcccattaaatagtagctttccacaggatatggggtaaataacgggattggcggtgtcttcttttgatatgccttcggagtaacaccgaactgtttacgaaaagctcgtgtaaagccttcatgagaatcaaagacaaaatccaaagcaacatccaccactcgcagatcctcatcacgcaaaaccaaagccgccttggataaccgcagcttgcgaatgtattcaaacggtgatttatccgtgtattccttaaacattttggcacaatgccatggcgaatagccggcctgctgtgccaaagcatgtagcgtgatctcttcatctaaatgtctttcaataaatgtctgcatgcgagtaaccgccgcagtatgctccaagtttgccataataccacctagtatctgtcaaataatccgacaagtgcacaaggaaggtcaagaaatcctcccgctgctctcctatacttatggtatcaactaaaaggatctcagtccaacttttcccagtttaattaatgcaaaaggaatggcaggtgaaacgagatggcattacggtcaaacagtatagttggatgacatacggcttgacaatcagatttatttttctggaagaaaaataaatactttaaaaggaaaaggagtgttccaaaatggaaattatcaaaaacagcttagtacgtcacatggaaaaattatgtcaggaaatcggtcctcgagcgactggatcggcaggaaataaagcagcagttgactacgcagcggagacgtttcgttctttaggctatgaggttcgattgcaggagtttccttgtatggattggcaaaataatggcgcagaactaattgttgatggtcaaacagtggaagtagcggctgcggaatatgcgatgccttgtaatgtcagcggcgagttggtttgtgtccaaacgatccaagaattagcagcagcggatttaaccaataagatttgtgttatgtatggagagctttgcaaagaaccgattatgcctaaaagtatggtcttttggaatgccgaagagcaccaagcaattattcgggaattagaacaaaaacagccattagctgtgattactgttagttttcttgaggaggttccagtcccgattatccaagatggcgacttcaatgttccatgtggaacagtcaaaggtgctcttttatcttcgctgttaaatagaaaaaccgctaacttacgtctgatgacagagcgtaaaccagccactgccgcaaacgtgattgctactttcggcaaaggaaaaaagcttgcttactctgctcatatcgacacgaagcctaccacatcgggtgcgttagacaacggtaccggagtcgcagttctactgacgttagctgaacaattgatccaaaacgaattagacaatcaacttgaatttgttttgtttaatggtgaagactactattcaatgcccggggaaatgatgtttatggaacaatcgttaaaccaccctgaagaatatgaattcgccattaacgtagacggtgccgggatgcaaaatagtacgatatcctactccctttacgaatgtccagatcaactaaccgaacagctggaaaactttacgacggattattccaccatcaaaaaagtcgaaccttggccaatgggcgatcatatgttgtttgccggagtaggaatcccggcggtcgcgatcacttcaacacaaatctatctattgatggaagcggtcatgcatacaccaaaagataacttatcgatcgtcgactttcagcgtttagaagaaaccgtcattttcttgaacaatctgaccacagcacaaatgaagtaactaaaaagcagtctaccgcttaccggtaggctgtcttttgtgtctttccgattaatcggctcattaaaaaactgtaacaattcttctcattatgaagggccttgccgttcatttattgctgcttactccattcgtaaatgaattccccacatttcacaatatcatcagaagcgctggtttttcgtcggatgagataaaaattccgcttgtagctttcgtccaatctctgatgtgaaattccttcaaccgctcgttccgaaactaatgaacagccaaagccttgcttcaataagcccacaatcacttcattattttggatttccatgactggactgtctatatccttttcctccaaaaatcgttttgtgtaataatagactccggatgtattttctctcaccagccatggacccttttctagattccctgctaaaactaactgatcctccatcaatgaaaaacgcttaatagtaggagcagacaaaggcttctcgataaatcccagatctactgtatgatgctctaccgcttgtaaaacctctaaagagttcatcatttgaacactaaaacgaatatgcggaaattcctgctgcaattggattagaagtgacggcaagacataagtggcaaatgtatgggaagccccaatcacgcaacgaataatctgttgttgattggtttgaacagcttgatataaattttcccaatcgttcattaaatcaacggcccgttcatataaaatatctgcttgcggtgttactaacacttcttttcttccgctacggataaataattgtgttccaaattcattttctaattgcttgatttgggctgagacagttggctgggaaataaataaaatctctgatgctttagaaaagtttttcgtttcataaactactttgaacgtttctaaccatttgaacatcgcaatcacttccattatttttttctatttaaggtattatatcaataaattataataatggaagatatcggttataatttatcatgcaaatgaaataccaatgaaaatcaattgattttttacgtaagaaaagctttttaataacaagaactatctaattttcgggtggtttcacttgcccaataagtagttacccttcaattttataagaaagaggtctaacgatgtttacaaatttttatactaaaacaaaaccgattttacctggtttaagcttgtccataggagtagcaatcattgcaaaactattcgctttgtttttacctaagcttggtggtgccactttagccatcctattaggaatcattttgggaaataccttctttaaacaaccggatctagccgctgggacgaagttctcagaaagcaaattactagaatattcggtggtactgcttgggctcaccgtcaccttccaaacgattggagaaatgggcatcaaaggattgatttttatcctgctaatcatgactaccgttatcatcggtgcttattggatcggtcgtaaacttgggtttaatgaaaaaatggctttgatgatggctggtggaaatgccgtttgcggttcatcagcgattggtgcgattgcaccggcgattgaagcaaacgatgaggaaaaaggtcaaattattacccttgttaatttactaggaacagtaatgatgttgacactcccctttttaggaatgtcacttttcggagatacgttattaagtaaaagtgccttacttggcggaacgttgcaatcggtgggacaagttgttgctggcgctagcttggttaatcctgaaacagtgaaatactctatgctctttaaaataacacggatcattttcttagtcgtagtcgttttcttgttcgaacgcaaagcacaaaaagatggactaaagacaactaaaggatcaaagaaaaaattcccgatcccctggtatgttactagctttttgattttctgtatcatcaatagtttcttttcactgccgccaatctttagcgatggtgcgcatttcatcagtacttggtttgaaacgactgctttggccgcaatcggattgcgcctagacttcagaaaatttttaaaagaaggcccacgctttttactttacggactatcggttggcgctgttcaaaccattgctgccttactatttatttttattttacatatttaatctaaatagcaacgattcgtgtaccgtgtgcctcagatagatttaattgggcaagaacataatccacattatcaaaacgaatgcctgcccctggtaaaataatgattcgtcggttggcatgatcgatcaactttattaaatggggaatattatcaataatggtgttatcagccggtccaccatgggtcaaaatgcgcttaacaccatggtctgctaaccaatcaattgctttaaactgattttcgatacttaattcgtcaaaagccatgtggaatgtaacgtctagattccccgcttgatctaatagtatctggatcagctcttcatccagccatccttctttcagacagccaaatacgataccctctgcctgcaatgcttggcatatctctatatctgctttcatgattgctgcctctgcttcatcatattcgaagtccctgcctcttggtctgatcattaccatggtagggacattttttcttttcgtataagaaagagtttgcttgattacaccatagctgggtgtggttccgccttgtgcaaggttatcgcaaagctcaattctgccagcacccgcggcaatggcttggggaatgtattcaaaattttcagcacaaaattctttaatcattttgtatctcctttttcttactttattttcaaaacgtttatcatctaattaaacctctcaatcagcaacttatcttgataatttattgtttcctttcttgtcagccaccccgattaaagttgatctgatattcttttttaaattgctttttcttcgatggctctcataaatcgagccattcctacttttaaaatatccaatggacagccgaaatttatccgaatataatcaccgtcaccctcttcaaaaatcgtcccttcatgcacatcaacaccatactgatttttcagaaccattctaatctcatcagaatcagcgcatggactatcgatgatcctcaaccatgcgagataggagccctcagatttgattagttcaacccgctcaattccagcaataagttgttcaagataatgatagttttcttctaagtgctcaatcagctcgtttaaccacgcaagcgcttgttcaggatgactatatatagtatttaacatttctattgcaaatagatctaagtcatttaacccattcaatttaaaaacgaattccattcttctctttatttcaggatttctagtaatggtataagaagcctttattcctgcaacattgaacgtttttgctggggaagaaagaacgattattttttcttcaggctcacagtttcgtaaaacagaatggaaggtatggcctttaaagataagatctccatggatttcatcagaaattagatatagttttttcgtttgtactagttgctttatttcacttaattcttgttcattccaaacacgccctactggattatgagggttacacagaacgacggcttcaatcttctgatcatcagtcaagaactgccttgttcgttcaatatcaacctgataattgccatccctatttaaaagcggtacttcgatcacttcaattccacaatttttcgcgatagtcatcaatggcggatagattggtgtaaacaataaaagctttccttctgttgttataaatgtttccaaaattacgcgatagctgtgtaaaacactggttgaaaaaagaatgtccgcttcatcaactttacaattataatgttcttcataccagctactaattccttcatttatttctttagaaatgtccgtatatccaaaatagtccgcttttactctattgattaaatgttctgctaaaaactctggtgacttaaaatccatatcggcaatccaaaaaggaagaatatcctttgttccataccgtgaccatttctttgaataggtctgctttctaatctctgcaattgccttcattgactaactccaatcatgtacttagtttttcaagattgacccaaaattctaaaaaggcctcaaacttgaaaaagacaagtttaagacctaacttcttaaatgtggaagatccgatcagcatagttgttctctatttctaaattccgttcatgcccgccatcaacattggcactcatatataccggcggttcaaagcctttttccaccatgatcttgattgcttcatacattgtttgctgcaaaagtaatgtcgctgcaaaggaagaggttccacaaacttttgtttctaaaccttcgatttctaatgccgcatcaccaaatcctgagtgattatctagtacaacatctgcaaattcgtataacatttttccgctatgatgacgcgaagtcgttgctttcgaaatatccaaagcagtaacaacgatcagtttattgccacgctttttgacttcttccgcaatttcaatagccattggatttctgcctgaatttgagatcaagaagaagatatcattaggatcaaccattactttatgcatcaaagttttcccaacacctgcacactgttcatacatgccgccagccgggtccatgattgtttttgatgtgattagcccacccgcacgtccactgatttcaatcgccgctgcataagaatgtccactaccaaacgcttgagtgattcctccgttcataattccttcggctacaatctcagccgctttagaaatgttttccccttcgttttcctcaataatttgcgttattcgtttacattcttcaaaaaattctaatgtcatttttctttcccctttttcattctgatatattatttttcattgcaaactacgtaccatttaacctagaattctaagattgtagaaaacaatcgatagtaccataactaacagaatagcttttgttgatgtcatcccctttttacctaacagccaataaacgagagcgaccaagcaggctggaataagggccggcatgatttgatcaagaatctcttgcaatttcatcgtaacctcgccagacttatagacgaaagagacatttgcggtaataacagttggaataagagctccgacaactgtcacccctaataaaattgccgcatctgttagcgcattaagcttatcgctgaattcattgaccaacttcagcccctgcttgtagccgaatggaaggaaggtaaatctggcgatacaaacggcaatatttaccaataaccaaatgattacccctgttacattgcctttttgtcccatgtaagccgcgatcgatcctaaaaccgtcggtagtagaaccccaaagatcgtgtcaccgactccagcgaatggccccatcaagccggttttgatcccggtaataacttctttcgattcgaagccttcctgttcttcaatcgccaagtccatcccgacaataaagtgtcccatcatgggattacagttgaagaattggttgtgggtctccagcatttcttttaactgttctttgttatctctatatttcttctctaggaaaggtagcatcgtgtaaatatagccagtagacatcatacgttcataattccaacaaatttggcttcctaacatccagcgataactcgctcgaaaaaggtcttttttagtgataatattattcttcgtattctccatcttcataacctcctaaagtgatcgttgcattagccgctgccactgtcgcggtctcaacgttcttatcctcaccagctttatgattgaaatgattgatcgctagtgcaaaaccgactaaagccacacccagcatagggacctttaagtaagccgcgaggaaaaagccagcaatcaagtaggcaatatatttattcgtgggaagatacttcaacagaacagcgatcccgactaccggaagcaagcctcctgctaccttcaatccgcccattagccaatcaggcatatcattgacgatcacatcaactactttttgtccaaaaatgagcatgatccctactggaatagcacgagataagccccaaggaaacattcctaaaaccgtatttcttgcaattccttttgtatctaactcttcgatgtttttatcaattctgtgtaagaagaacgtgttggcaaaacgagctaggacatctaattgaaccatcagcagccctactggaaccgcaatcgctaatgcaaactcgatccctttaccagagatatgcgcaaaggctgtaccaacgatcgccccggtcgtgaaatccggaacggaagcgcctccataagttcccaccccaagaaccattagttgcaaggtagctccgattgtcaatcctaaagtaacatccccaacgatcaatccggcaatggtccctacgattaccggaaactgcattccgatgactaacgttaagttgtccaaaatacaaaagaacgaaaaaatgattaaaatagcaatttgccaagtagctagctccatattaattctcctctctcaacaatttcataaaatcgcttttgtcctcattaggtaccatctgggcgactaatttcacacccttctcatttagatgtttgaacgcttcaatatcttcaggtgtaacaccaattgattttgcgacttgttttgagccttttttggctgacatgttcccaatgtttatctcttccaacatcacgccattgtccactaactcaacgagcgttgctggatttttgacgatcagaaaaactctttgatcatcgtattgtccattagttattcgagcagaagctccttttgtggtcaaaatactgagcttgactgagttgggcttagccatcttgagaacatctttttccatctcatttttaacgactacattatcgactaccatgatccgatttacttttaagtgattcgtccacattgttgctacctgtccgtggatcaagcgttcatcgattcgaacattcacgatcattttcctcgcctccaatttctataattccttgatagattcctttgcaccaatcaaactattctcgatactttcccccatgaccagactgagcatcattgatagattcaatcccgtaaatacccgtatcccgttactattctttttggtcaacagagccgcatttgctggactgcctccaggaatatcacaatagattgatacctcatcctcagcaaatgctatccgtttattgtattgctcgataatatctgtcacagacatctcttctgtaaaatcaatcgagaagatattgtcctgctttcctgcaatcatctctacactattttttatcgtttccccgtacttgccatgtccacataaaagaatcatcttctcaccttcctagacagatgccacagtgacatcaaagtagttatattttttatatgacagaataaattcaattaacttgttatcggttgaaaatgttttttgcgtcatgagtacaactggctctgagtcagacaacttcagtagtttttttacatcatcaggaacaggaaataaaattttgaaattttcttcaaacttggcattaaataaattaatatttttcttctcgcgaaccgtgtcatagatcgatttcagctgttccttagaagctccctggatgtaatttgaatcaatataggtcactgccagttgaatcgcttcgttccgcgcatacttcaatcgcgtaattttctgaacttcgataccttcatcaaactcaccaagaatttctgaagtcaactcattttgaacagaaatgacctctgtgtgctcatcgctgcgatcgtaatatttatagtcattctcgaagtatcgtacagttgatcctctaagtgctttcgtaacaaaggtaccttttccttggattctgtgaacgtatccttcagaaacaagttcatttagcgctttgactaccgttgtggaactgacgttgtatttactcttcaaatcggcttcactagaaattttttgtccgggttgaaattccttcgataagattcgtttgacgatatcttgttttatttcttcatattttgctatggccatgatttagctcctcctatctacttaacacgttaacctgttaacacgtccataatagcacctcgaaaaacctattgcaagcgttttcttaaaattgattttttccttattttagaaaatgaagcctaatgactatttcaccaacataaaaaagccttccaattattgataggaaggctttaaacgtatttattaaattgacgtttactcaacaaccgcaataatctcaacttctaccaacgcatccttcggcaagtttgcgacacccacacaagaacgactgggtttttccttatcaaaaaagctagcataaatttggttaaatgctgcaaaatcagacatgtttttcaagaagcaagtcgtttttactaccttgtcgtaatctgctccaacagccttcaataccccgccgacatttcgtaatacttgatacgtttggtcttcaatcgtttctccgactaattctccgcttactggatctaacgcgatctgaccagaagcatacagcatgccgtttacaacttttgcttggacatatggtccaattgcttgtggtgcctccgttgtttccaccgtatagattgatttttcttgaaagttcacttctgttacgttattttccaattgctccactccttttttttcattacaattaaccaacaaatcattcaaccgaaacaagactattactctgctaaactgaaaaaagcatctcaccgattggtgggatgcttggagaatcccactcaacaaatgtcaaacaggacttcaaactgtttttccaaaacagatttcaagtcctcagtctaataataatgatcatttgtctagtagtcgtcgcgttcatagaaattctccttttaaaattaaatttaaatggcatttaaattaatttatgattgtaatgataacggaggttccatttattgtcaatgagtttaaagaattttctgacatttctatctcacatttttgtaagaagattgttcgctcaataaatggatggatggaaaaaatttcgttatcctcttgttaagaaagagaggatttttttatgaataaagggatgaatggtttccagttaaaagttttaggggtcgtgaccatggtactcgatcacattgcggagttttttctatttttaggagtgcccatgtggtttcattggattggtcgaatcgccgcaccaatttttctttttgaaagttcagaaggttttgtccacacccgtaatcgaaaaaaatatatgtttcgtttattagccggtttttggctgatgggaattatcaatatgattttgaatcgctattttgcggttggagacgcaatcgttattaataatatttttggcacgttattcttaggtactgtctacatgcaagcatgcgaatatattaaagaccgtaaagtggctaagggagtaatttggttccttgttccaaccctattaagtgttttgacaatcggcctgttgtctagcggattacttgattctaaattcggcatgctttttttccaagcatttaatttacttgtaccaacactattgttaactgaaggcggaattctatttgttttattagcagttctattctatcttttccacggcaagaaatttttacaggttgcagcacttgttgtcattgcgttactaaccctgattttcggtggcggtatacagcatgcgtttatgatgaattaccaatggatgatgatgttttcagcaattccaatcattttatacaatggtgaaaaaggtcgcagtatgcggaatttcttctatattttctatcccgcacacattgcaatttttgccattatcagctttttgatccaacgctagacttgaccttctccataaaaagctttaaaatgctttttgtgaataaatcgtacagataacacgtaatgcgtgtcgagagagaggcggtttctattaatttagaaaccacctctctttttgtcagttctgctttttgcagtaaataaatacaagcagattcataaccaaaagcgttgagcagtttagcagaatgctatgcgcaatgaaagaagtgcctgccattaaagctgcttcttactctggcaaaataaataatggagacgcccgaatttaaagttatttgtcgaattaaagtgaggttattatatgaaagaaaagaaaatccatttattactagctgtccttgccactgggatcatgtcctttgccggagtcttaatcgaaaccgccatgaacgtgaccttccccactctgatcaagcagttcggaatatccaccgggatggtgcagtgggtcacgaccatttatctcttagtcatctctattatggtgcctttttccaattatctattgaaaaatttttcgattcgaaaattgtttatcatcgcgaatctttttttcattgctggattgatgacagatttgtggtctccttcttacagtattttgttaattggacgcttattgcaagggattagtaccggaattgcgttacccttgatgttccacattatcttaaatttcacccctatgcataagcgcggaacgatgatgggtgtgggcacactgacaacgtccattgctccagcaatcggaccaacctatggcggtattatgactgcaagtctttcttggcatgcgatcttcttatttttattacctatcttagtgctttcactaatcattggtctttatgccattccagaaatatctgtcaaaaaaactggtgcattagatattgtcagtctcattggcgttgcattgctattcagcggactattgatgttcttaaatcaaattggaagtttagcgagtctactttcattggcagttggtatccttggcttattgatcttctatcggcaagcgacacggggaaaaaatccattagtccgaatcactgttttgaaaaataaagtcttcgtactatttttgtgcggtttcttagtttgtcagttcttattattaggcatttcctttgtcttgcctaacttcgttcaaatcgttttaggtaaagacgcctttattgccggccttgtcatgatgcctggtgcggctgttggggcgatcttagcaccaatctctgggcgtgtcttggattcatttggtgcgaaaaaaccaatcttactaggcttaagctttgccaccatcggctggatcgcgttgactctgttgttacgctcgccgtttttacttggtttcgttgcaggacatgttttttatatgatcggtatcggtttttcttacagtaacctaatgaccacggggatgaatttactatctgaagatgagtacggcgatggaaatacgttgttcaataccttgcagcaattctctggcgcggttgccaccgcgattgttgcgacaatcatcaatttagcgcagcaagcccaatcagatttcatcgctgccaccactacaggctcgcaaatttcactgttgttcttattggctttattgcttgccgtcttgattgcttgtttgattcattttcgtaaagcagccactcctgcttaatgttaaagtaacgggcaaatgttcggccgatactcgctagtttttatatcaaatcctgctaaacttaacttatcaagtttggagggatacatcatgacattaggaacgaatttcttcaatgcacgaaaaaaaagaggcttgtcacaagaagaagtcgcagaaaaactcggtgtaagcaggcagacgatttcaaaatgggaactggatgaaactttgcctgatattaaccaatcgaagaaattagccgtcacatacaaggtttctttggatgaattgatcgaatttgatccggatcttaacgatattaaagaagtgattgccaaaacgagtgaagaaaaacaagcgaaagtcgattggacgaatgtctgggcggaaaaataccccatcttagcgacttatcaaacggaagtcgatttgaatgactacatcccaaaaataaaagatatgcttctgcttttgaaaaggaattatggctataacgatcaagatacctttttagtcttgaaagatattttggctcaaatttggaaggatacagaaaagccgtgacgagcgttcgtcacggtttttctatttactcttcacattcggccatttcatttgacgtttctgttgattcactctttttcacttgcacaatcaagagaatcgctaacaatacaatcacggctccaaaaataggtgtgtaggcgatgcccattttcccagttacttgcgctcccactgtcgaacctagtgtgatcccgatattaaaggcagcaatattaaacgctgaagctaaagtaatgtcttgcggcacatatttctctgctaactgtacaacatacaattgcaagcctggtacattcatgaaggcaaacagacccaagagcaacgccgccagcaaacctagaatattgtttccaatcaaagtagtcgcaaataagaatacaagagccgccattaaaagaccaaacattttaatcaacgaagccaacggtttttcattggcaagctgtccaccaatcgtattgccgatcgccaccatcactccgtaaacaatcaaaataatgacaacagcactagctgaaagtccaaagccttctaaaattggcgacaaatacgtataagccgcaaaggttccaccataaccaaaggcagtgattaagaaggacatgaccaatggtttattggtaaaaattcgaacaaagcccttcaagtcaactttaccgggaattggcaactgacgaggcactaagaagctactggcaattaagcctaacagtccaaccactgcaataaagataaaggacatattccacgtggtttgttgacctatgaaagtccccaacggcactccggttacggtcgccacagtcaaacctgtaaacatgatggcgatcgcactagcacgacgggaaggttctacgacatccgccgcgatcacggtggaaaccgacataaagatgccatgagccagcgccgctaaaatacgccccagcaataaaatcataaaggtcggtgcaaaggctgctaataagttcccactaataaacagcagcatgatcccgatcatcagattgcgacgattccattttccggttaacaccgttaataaaggggctccgatcgtgacgcctaacgcgtataaagaaacggttaaaccggcttgagctaatgtgacattgaagcttttaacgatcatcggcaaaagccctacactaataaattctgttgacccgatcgcaaaggcgttgattgcgagagccagtaacgttaagtttggtgaaattttcttttccatgttgttcctccttagaatggtttcatgaactccttcagcttggccagttccacttcgtgcttcagcccgattagcggattggtaggcgtgacgacaatcaaaaccacttttcgcccttttgaaaaatggtttcttaaataaacgttcgctctgagcggtaaagctagttcatgaaaccagccatcaaaaaagtatttgtaacctacgagaagatactatatactgttgttgaccttttgataagtacccacttttttgtactataggtacctttcagtaacttttggattatatcaaggttttttaggaggaaatttattttggaaaatcgtacatatatgatcggtgttgaagcgacgatggatgtcattggcggaaaatggaaaccaattattctatgcaatctgcgccatgaacccatgcggcctagtgatttgaagcgcggtatcactggtattagccagaaaatgctgacgcagcagctgcgtgaattggaagaggacaatatcattgatcgcaaagtctatcagcaagttccgccgaaagtagaatattcattaagcaactacggccgcagtctatcagatattttggatagcctgtgcaattggggcgaacagcatgtcgctcatctgcaaaaacaaggacaggctatttgcttgaaagcaaattaaaaaggaagttgaggtgacctcaacttcctttttatctgatcaaaatgtcatcagaaatctctgcccaatgattcgttggcccgtgaccatgcccaacgaaaataggttgactaattgcggcttgaataaatttctttccaatgatgatcgcttccttcaaatctttcccttttgccaactcagcagcgatacaagccgaaaaggtatcgcctgttccatgagtattggcggtctctactctcggagcgctcatccagaagctttctcctgatgctagtaaaacaaaatcagcagcctctttattttggctatgcccacctttaacaacaacgtttttcgtgcccaaattttgcagcttcttcgccgcctcgatcatctcctgatccgtaacgattcgctgtccgatgatcacctctgcctctggtaaattcggagtcacgatggtagctaacggcaatagtttctcattaatggttttcactgcatcattttgcaacaggtgatgaccgcctttagccaccatcacaggatcaacaattaatggtccaaaattgacttgcttcaatttcttcacgacaatttccacgcgttcgacatctgccagcatcccggtttttgccgcaccaatcgtaaaatccgcggctagagaatcaaactgctcttcgataaaactactgggaatcgccatactatcctgcactccgtaagtattttgggctgtcaatgctacgatgatactcataccaaaagcttttcgagcttgaaacgtttttaaatcggcttgaattccagcgccaccgccagaatcagaacctgcgatcgttacgacttgtggtgttgaattgatcatacatgttcctccaatacctctgctatttttccccttagagcctgaacttttttaccaacattttccgctaacatgatctcactaacaatcgaaacaccatcaatccctgttccacgaaaatcagatagattttcttctttgataccgccgatcgcaacacttggaatcgtcactgcctcattaatcgcttttagcgtctcaatcgaagtcaaagcagtgtcttttgtttttgtcgggaaaatggcaccaatccctaaataatccgctcctgccttttcagcctctaagccacgatccacagtttttgctgatacccctagaattttttctgtaccaatgagcgaacgaacaatatccaccggcatctcatcatctccgatgtgcactcctgctgcgtcgactgccaaacaaatgtcaacacgatcattaataattaaaggaacatcgtaacgatccgtaatagcttttaccttcaaagccagctcataaaaagcacccgtcaacaaagtcttctctcgtaattgaattaatgtcacaccattttgacaggcctcttcaatcaccgctaaaaacttctcatcgctaaaatcataccgaccagtcactaaatataaggttaagtccaatgcttttcccgtcctttcacttttgtccaccagttctcctccatcaatattgaaagctgattcaacgtctcttgccggaaagcggctagaccaatcgtatctcctgcttgctctccgcaaagattaaaatagctaaccgcagttacagccgcatcaatcgctttcaatccgccgcctaataatgctgcaatcaacgcacctacaacatcgcctgtaccggtaaaacgatccaacgcaggcacgccattcgctaaatgaaaaatacgttcttgatcgacgataatatcttgagaacctgttgctaggaacgtggtcttcggataaagagccgctaacttctgcatagcttccgataattcagcgattgcttcttcactttgatctagctcactaccatccactccacgagcctgactcggcagcccgcaaaaattccgtagttcagaaatattgccttttactactgttggattttctgccaccaacgaacgccctacttgatttcgaaccctactgacgccataaccgaccaaatctaccaccgttggcttatgaacgctatttgctagtttgctcgctgccaacagactggtcccacgttcttccgacagatgtccgatattcagcagcaacccgtctgtttgttgaaataattcctcaaactcgcgaggatcagaagccatgatcggctttgcaccaacgtaaagcaatgcatttgcgaccgtttcacaggtcacttcattggttatacaatgaactaacggagcattttctaatggaaatccctttgaaatattcgttttgatcatccaaacatcctttcacttgaaaacaaccgctgccagcgtttaaaaatcgttgtttcctgcaatttaaccaacacaacaaaagcaattgccgaaccaatcaacgttgctccgacaaatctcggagtgtaaatcaaccagtatagctcattttgactccctgtaaaccagaccattacaggataggataagagcgaaccgatgattcctgtacccacaatttcacccagcattgaccaaatcagtcttcctcctaaacgataaaatagaccagcaaaaaatgcaccaaatactgcacccgtcaacgctaaaggcggaatccccaacatcgtcatccgtatcaatgcacagactaacgccatgactgttccgtaaaatggtcctagcaacactccggcgataatgttcatcacactggacatcggcgccatcccttcgatccgcatcaagggagacaacacaacatctaatgcgatcattagagccaataacgtcaacttatgaattttacttttttccaagacaaataactcctttctacaagaaacaaaaggagtaaaagacagaaaaacccaaccaaaataaaatggtcgggtacgatcagtcaactagctacatttccctgcgacagttttaactgcatcaggttccatgggtataatctcagccaaaaagcaccccaaatgtttctcttcaattgattggagtataacatactttttttaatccaactagcttataatgagaaaaaaggaggacctactcatgcaaaaaccagatttttctgccatccatcacgtcgctatcatcgtttcagactatcaaaaggcacgacatttttatgtagatattcttggtctgccaatcattcgtgaaaatttccgaccagaacgccaagattataaattggatttacagctaaatgatgcggaattagagatcttcgctattaaaaatccaccaaagcgtcctagctttccagaagcagcaggcttacgccatcttgcgtttaaaacaacggacatcgaagcaacagtcgcttatttaaatagtcacggtattgattgcgagcctttgcgcaccgatgattttactggagagaaaatgacctttttctttgatccagatggcttaccgttggaattacatgaataaaaaaagcagaaaattctgctttttttgcgacttagtatcgaatatctactctttttctaccggatatttaatcgcattcttcttcaatttctcactaatgatctcgtcaatatcaaagtccaaattatctgccatcatgtaagaataaatcagtacatccgctaattcttccttcaaccgctccgtttgcgtccgcgcctcttctgaatctttccactgaaaaagctctaatagttcagccgcctccaagcagatcgacaaggctaaatccttctcattatgaaaaggacgccagtttcgttcatcgcgaaattgattgattttttccatactattattatccatactcaaccttctttcgctactattctatcatagtggccaagttccgtttttcttcaagcttactgatcatttcttgtatccaatgtgtactttgactagttaaaaaaggatcaattacgactacgggataatcattcggcaatccttcagctgaacctgtagtaatcaagcaatcataatttttcaactcataatgcaactgagcgattcctcctgatagattctcaaaatgattgattatgaagtttccataaattgtatcagaaatttgtttcgctaaaaagctttcttctgtaggggtcaaatcagataataacaaaacttttaatagtggttcttgattcgccaaccattccatacacctttcttccatcgtaatcagtagatagacatagttacggacaaaatcttcttcctgatatatctcgtatttcgctacaaatctttttactaaattcgttattttttctactccgcgactatacatttttgatgcttccgataaaaacatagttctgttacgccatagtaaacagacatattgcccttggggatcatacatataaaaatcatttgataaaactgtcgctaagtcaattctgctttgtttttctaatcgatagcctagcatctcattgtattcttccacgagttcataatgacgcataaatagctgctgatagtttgcattatctgtcatagcaagttcacggtgttgaaagctgaatacgattgaatcagaaaaaattaaccacagaccttccctcaccatttctggtgttaattctagatctaaaccttctcgaacggcttgtcttagtttcttatactcgatatccataggcaaaaacaatccttcagtccgcagctctccttttggataactatgaccatttttcactcgccaaatactaatatagaaattataaatcaagcgcttttgaaaaacatatttttcatgaatttgattcactctgacaaactcttctacatattctccgataatatggtagtgcttcgttggtaatttcggcatcgagctttcaaaagcattttgtttctcactgtaaaatcgataataaaaatttcggatttctccttcgtttccctctactcgcaatggccgataacataactccatgcccgccaatgataagattttctctagctttttcaaataacgctgtgtattggaagaactgaggtacagttttttagctaatgcagtaatattttcgcactcttcatacaaaagttcttcaataatctggaattctggactagtattcaaaatattcgcatataaattccctagactaactcttttccccacattcaatcgataaatcccttttgttttcgtaatttgaaaactaggatattcatcattgatcaactcaatatcatttaataaaattggcagcgaacaattcagctcgcttaataattgatcgctcgaccacccctcacgacgataatagagtcgttctaataatgctaatcgccgtttgttgcttgttcctaaaactgaacgaaaatccatgatcattctcctctcaaaagaacgacttgctagtaaactctcccctttagctgaccgtcatcatccgccatttcttcataatttttgtactttgataaaaaaatgaaaggctattgattaataaatcattttctcagtaattttccatttttaaagtaaaagaaatatcaaacacttgaaatattctaatgttgttaacaaataataatataaatagatggtggtggcaatttttagtcaaaatcattcaaaatacgtaattaacagattgatttttttaagatgaagaggaaaaagtaaaaaaatagtgaattcaaatcaaattaaaaaacgttaaaagcaattttaaaggctatttatttgttaatatcatcatttttgagcatttttcgttaaaaaattcatcgattataggttatcccaatttttttcaaaaaataaaaaagcaagggctaaagtaaggacctgacacaataacctgaaacgaaatagaattacctctttattaactcaacaaaaactagactgccgatctccgatagaatttcggaaatcagcagcctagaaaaatattttttattactgtctcaatcttttaggtcagttcttaaagaccatttgtctttaattatttctattaattcagtgttatagttatccaatataaaggctaatattacatgataaaagtataatcccagtaccagtgatcaacagtaagaaactgccttttgattattaagaattctttacctctaatcactaactggaagccgtttgtgctcacatcaagttttacataatttaacctgatattcgtactctctaaaatttttagttaatcagcgctagataatggttttgccaaaatttttcagtcacaaccttctcaccatcatcaaacttaaattcaccttccactggtacaacaatctgctcatctggcacatggtaaagccggcgttgccccttaattggaaacggtttgatacaacgaacattctcaaaaatccatgcataagaatcgtcagccaatttttttacatcggttaaatcaacaatacaaacagcataacctgaaatgcaaccaggagtcttgatagctgtcgagcagattaataaaggtcctctatgatgggttgtccatgatcggtattcctctttcttctttcctagtagaatatccattactggctcaggatgaatcgagatagctttcaaattgttcgcctcacttttcgcttatttatagactagtttatcactttatccaaattctgataaaaataattaatcgctttcatctttactatcacgtttaattttcttaaaaatttccagccaaacgtcatcaaatacaatcacttgagtagcaatcctttgattttcaactcgattcgttacattgtataaaacgcgggctgccgcttctttggggtactgataaatgcctgcgctcaataccggtactgcaagtgtttgtatatcattttctcgtgccaattggaaaacagcttcataggctgaatacaataatgtttcttcctcatgttggccatcaatataacgtggacctaccgcatggattacatactttgctggtaaatcaaaagctggcgttatcacggctgttcccgtaggagttccaccaatcttagccatcgcttgcttcaattttggaccagctgcctgatttaaagcgccgtctacacctccaccaggaattagggctgtatttgcggcattcacaatcgcgtctactcgattagcaagacgagaaatatcgcctaattttacttcgatcataaaaacactccttgattttttagatatgaaatatgcaatcgctcctttctattataccaagctaacaagaatcgtgggaataatagaacctagatcattacctgactccttgaaatgaaaaaacgagtggctaatcctgttaattacttgcagaatcagccacccttttatttttttatcacaaatgacacttagaaaatttcttcatgctgtctttcaaaatcagccaaaatctctcgaacctcagcggttgacttcgtattcattaagctcacccgcaaatcatttgcaccggggaatcccttaacatagattttaaagaaacgatgcaatccaacaatcgaacgaggaacctgctccgcgtacttgtcttgcaaatcaagctgtaatcgcagcaaaccgattaattctttcggcgaatgctcttgcggttctttctcaaaggcgtatggattcttgaaaatcccacgcccgatcatcaagccgtccacaccatatttttcagcaagctccagacccatctgacgatctaaaatgtctccattaatagtaatcaatgtctggggcgcgatctcatcccgcagctctacgattcgaggaatcagctcccaatgcgcagccaccttgctcatctctttgcgcgtccgcatgtgaaccgaaagattcgcaatatcttgcttcagtaaatgactgatccatttctccatctcagcagtgtcagtaaaaccaagccgcgtcttcacactgactggtagcccacccgctttggccgcttcaattaattctgccgcaacctccggacgtaaaatcaagccgctgcctttgccacgctccgcgacattcggtaccgggcaacccatattcaaatcaattcctttaaagcccatatccgccaatgcgatactcatctcacggaaaaattctggcttatctccccagatatgcgccaccatcggctgttcatcctctgtgaaggccaatcgtccacgaacactttcgattccatccggatggcaaaaactatccgaattcgtaaactccgtaaagaaaacatccggtgcccccgcctcttttaccacatgacgaaacaccacatccgtcacatcttccatcggtgccagtataaaaaagggctttggcagctccgcccaaaaattattattcattatgtatacttcctcctaaacatcaaaacaacgtcattatactaagattttaaggcagaagcaaaaatacaaattgctgactaatgaaaaaactatccttagtgcaaactaaggataggtaatttcattaatatgttctttactatcataccaaagctcttctggtgaatagaaatccgtaccatttagaactacttcacccgactctttgatttcaaactgcgaaccgatccaattataggaattatattttccaaacatcaatggtccacgtttcccctttcctctacttggagagaaaagatcaatcatcccctcaaaaagatgcgatcttagatatcgaatctcatcattatcaaaagtaatccgtagaaatccagccatattttcaacatttactgctttaggcaccttaccttcaggatattttttaatcgcgatcgacttgtccatgttctcttctcctttgattttagaaaagaaagaagccaaaaatgacggttttgactttcctaaaagttcatccgtagatatctgaaaatagttgctcaatcgaaccagcatgtccaaatcaggataacttttctttctctcccactttgaaacagcttgcggagtcacatttagataatcagccaaatccttttgcgacatttttttcgcttctctcaactctttgattttagctccgatctctaccatgaatataccctccagtattctaacaaacaataaaccttctgttgaaatcataaaatttgtgctcaactattagttgaatacttaaattttaccattttcagaaggtttagctaaataatagtcactgttgattgattccttaaaacagctgtttaaaaagcaatagttatttcaatatatcgatcaattctttttttgctgcagctgaggccggtaaataactaaagcctactccgatcaaaaccgaagtcccgatcgaaatgaataccgtcatcatatcagggcgaacagaaaacggcagtgcaaaggacgcaccaaaagcaatcagaatacctaaaatatagccgataataccgccgcttgctgttaaaacaattccttcaaatagaaattgtaatttgattgatttggcatttgccccaagtgcacgccgaatcccgatttcctttgttcgttctgagaccgagatatacatcatattcattacacccacacccgcaataaataatgaaatagctgctactgcgctgataaaaagagtcatctgatctagcattgatcctagttgtttaatttcagagcttggatcatagctttgatattctcctagcgttcgactctcaccattcatgttgagctgttttaataccttggtcattgccgcttcgttattcgctttcgcattgaacttaatagctaaaacggaatgatcctctttttttcctaaatagcgtgtgtacgtcttttttggaaaaaaggccaatggttcatagttttgtggtccgatttcacccgaagtatttgcagatacaccaacaactgtaaaaacttgaccatttaaatcaaagcctttattcaatgccgcttcttttgaaccaaaaagctgttttgctacaacctcatcaagaacgacaaccttattcaagctatcactgtccgctgcattcaactgacgtccgtttaaaatagataaatttgtttccttcgtcggattaacggtcattgacagcttcgtattcttatcataaaaatcaactgttggattactatcttttttcgttgctttataataagaaacattctttacttccggcaagtttgcaaccatatctttatcagtctgcgagataccgctattgtcactgaccaaattatcaaaatcattgtatttaatattgatgtattttgtttgtcctgtttcatctgtaccagttgtctcagataaaatgtttcgtttaaacccatttcctaaagcaacgatcatgataactgcggcaatcccaataatgatacccaccattgttaagaaactacgacgtttatttttaaaaatggagcgaaaggcggtcctccagagtatgtactttctcacgactgcagcacctcctcgatcattttcccatctctgatttttaatagccgatcacagtaaacaactgtttcaggatcgtgtgttactaaaataattgttacaccttcatcgttaagctgcttgaatagctgcatgatttcatccgttgtgtgggtatccagtgctccggttggttcatctgcaataataaaatttggctgattaatcaacgctcgcgctattgctactcgctgctgctgtccaccagataattgcttaggaagctgatccagtttttctgataatccgactctttttaaggcgtccttcactttcttttgtgtttcattatgtttagcccctttatataaaagaggcaactcaacattttcagccactgacaaattttcaatcaaactaaaattttgaaaaacaaaccctacagagcgattgcgaatctcagataattcttcatccttgaaatctccaatttcacgtccattaaatagataccttccgtcaaaatgacgatcaataaaacctaaaagattaatcaatgtcgattttcctgacccagaaggtcccataatggcgacaaactctcctgcggcaattgaaaaattgacatcttctaaaacagttaactgtgtgtccccggtctcataatatttatacacatgctccaatttaatcattcgcagctacctgaatttccgaaccgtcctttagctcatcatctggattttcaatgattttatcattggctttcaatcctttttgtactatattatgcccactgacagttactatttgaatcgctgttttcttgaccttgccatttacatatttataaacatattgttcattttttgttttctttatcgcagaatcaggcaacaaaagctgcttttgctgcaaagttactaaagttgataaatcatctgtccaaggaaagtccccttctacaataaattcgtaggaagcgacattgctgttgtccccgctagttggtaacgcactagtagcaatacttttaatcgttccgtcaacttttttatcattgccgaccgtcgttacttgaactgtttgaccaggcaccaatttgtctaagtcatattccgtaacaattcctttgacctgcttctctttgctagataccgttactacaggaacttcaggactaccttttcctttttcatccaccgaggcaatccccgcaatttctgaactgactgtcgatgatgcttgtttctgttgtccagctaatacatttttagccgattgaacatcctcataagcactttgtactgcaaaacgtgattgactcaattgatcattcgctgtttgcaattctccctgctgctgttttaactgttcatttaaagccgtcttttcttcttcttttgcttgtgtcattttttgctgtgtatcattgatttgattggtaattgtttgtacttgtctttcatttgccgctacagtcgcctctgcttgtgaagcatctaatgagcttttttctaccgcatgccgctgtgagactgtttcattttccacggcttcattctgatactcaattaatggcgttccaattgcgacctcttcaccgttacttacaggaatatttttaattctccctttatttccatcaaaaaaatagagctgcttcttaagtggttccactttacctttaagttgtaacggatcagctgcttttactgtaaagacatgatatggcgattctttctttttagaatttaatgcaaaaaagccacatccggctaacactacaccgatcactccgactaacataagcttcgttttcttcttcataaatttcctccaaataaactttctatagtcagtttacaaggtcagaaaatttttcaacatcgaatcaacatagtataaactaacaaaaaagtaatgccgaaaaagtttctaagtcttttcatttataaagctaaatatactcgtgagaccgatgcgaacttttataattaacaacgaattataggttatgcgttgatatccaattgtgttttatttaaaaatttaatttatgaattaaaaaaattaaaaagaaggaaaaaatatttagtctatttttgatactgtaagattgcagtaataacaaagaaataaggcgaatttattaatagatgattttaactaatccctaaatatttattcgctgataggagtggtatttatggcaagaatattaatcataacaaaaaatttaatggttgaaagagatttgcaagcaatcctacaacgttcaaatgatgaagtatattgttcttgcgatttattaaatgatgctcaattttttccacaaattatcaagtatttctcattggtcatttttagtgacactgtctctactttagatatttcgaagtcttatgccttcttcaagaaaaatggtttgtttattttgagaaaaggaaataaagaagatctaacgaagtcagaattttctcatttgatcaatgtaattgatgattggattgaacctgaagcaacggatatggagatcacggaaaaaattgctaaactcgcaagtgaacaggaacatacagtttttgctgctggaaagaatcatagcttacaaaaagaaaagaactctgagctattctttttcagtctttcttcaaacgaaaaaaaattattgtaccatctctatgactatcaaaaagatgggaaagtgctctctcgagaaaagatgtgctcattaatttgggagacagaagcaacaagatccaatttatgccagctttctaacttggccaatcgaatcaaaaagaaactagctatctaccagtttcctgatggcgaattgaccacgtcttggaataagggatactttttaggtgacttattatttagtgaaatagaaaaaaatatgagttaactaagtctaagaggcttgtagaaaaagttgattactcacctcatcttcaccataacaaatagaaggatgcttattttattaggtttaacaatataaggagacagttcattgatagacaattttatagaaaaagatatcctgcgcagagttaaaatcacttatgtactatatgaatgtagacaaataaaaataaacgagctggccacgaatataaatactagctttaacacaatcaaaagggattgttatacgatcgcctctaaattagaaaacgacttagtttcctataaaatatcccgatcagaattatcctttcaatttaaaccggacactagctgttatgagttggttcgtaaattatatttagattcactttttctgagagtatgctaccgataccttttgggaaaaaataattatacttcaatctctgaggatgaatttatttcagtgaccaaagtgttcaatttaaaaaagaagtctgagagatattttcggcaaagtttaggactcaattctgaaggagaaattgacttcgataataaattgaaaataaggtatatttttttagctatctggatgcggggaattggcattagtgagcttaataaaaatccgctcttcttccaatctgaaaaaattgcgcttgctataagtgagcttttaaaaaacagactcagtaaaaaaagtctgctttatctgcaatactcaatttttttaagtcttacaagaagagacactctaatgatagaagccgaaacgatcgcgtttttgaagacaggaattatttttaatagcatcaacacttgctttttacagcaaaacgtagagatggatgatcaaaatttagcattcatttcttttgtttataaaaatttgccttacaacccagaaagctaccgattaattgaagtagactatcaatactatcgtacacgtttaatcaaaagtcatccttctgttgttcagctgatcagaaatttcgaggcaggattcgaaatgaatctactcggggaaatggaatttgaaaaacccttgatggatttagtctataccacctctttcggaattaatgagtttttacttaaccaatacttttttataaacagcaatgatttccatataaaagaaaaagtaagtaaaatcatatgtgcttggttaaaagaatacttttcaaatactatcaccatgtctgaatcaatcattttgcagttttgtcaacaagtcatgccgcttttaaaaaaaggtgaaaaaaagaagattcccatcataattgttgctaaagatgaatactctcatatgttgtttaggaacaatattaacaagatcatttcagaaaactatttttttatcaatgatgagatttattattccatcgacgatattcctgagttattttttaacattcattgttttatcgtttgcgaacgttgcttactaaatcaagagcgaaaatttattcttccaatctccatcaataacttgaccaacgatttaaaagatatctcaaattacatcttcacatgcgttttgacaaaataattatacgcgacactactccatctgaaacgaaaatacttttagaaaaaatggacctttaaatagaaaaaagacacttcccaattggaaagtgtctttgaatttctgtataaacgaattaacgttttgagaactgtgaagctttacgagcttttttaagacctggttttttcttcgtatcattgaataagtttgaaaaaccttgatttataaaggttttcccgtaaatatattttattatatttgattaaatttgaaatgtttgtgttctaaaatgtgttctaatttaaaggcagtatatttcgtattttagattaaatttttaggctcattcattctcaaatccattctattcagtcaataaaaattttaaaaagactttataaacaaagatgttcaagcgagcatcttatttttttgtgcttaatttgaaaggagaacatttcatgtataaaaaacaaaaaaagaaattatgtgtattaactattttgagtttggctgttcaagcaattgttggagcaattgctcctacgattacttttgctgatgaaattacccatccacaaacggtaaccgtagaactagatttagcacatcaatatgctgttgaaggaacttttagtgatggtcgtccaatgtcagaagtcactgttccgcattatgcagtgtacaacggctttaaacaagatattttctgtattgaaccaggagtcccgatttacaatgagttcactcctggctatgagaaaaacccgttaccagatatgtccgataaagccaaattagtttccgttttatggaaaaaagtaggtacagatgcagatactcatattgtggcacagaagatgatctggcaagaagttaatgggtatacccttcactcaataaaacgatcagatggtagtgccgtaaatatcgcagccattgaggcaaaaataaatcaagccattgacgattatcagaagaaaccaaccttccataatagtacggctaaaacagtattagggcaatcgactactgtgacggatacgaataatctgaatttgtcagagttcgatgaggttgtggaaaatgccgcaaacattgattatcgtgtgaatggtaatcagttgataatcaccccaaatgccaattcaaaagaaagtggtgtgctgacgcttaagaaatctgctggtaccggaacacctgtcgcctataaaaaggctggccaacagactttaatggccggggcgattgataaacctaatacctacacaatcaaaattgatgtggaaacggagggttctttaaagatcaaaaaagtcgataaagaatcgggtgatgttgtaccaggaacggttttccatttagactttggaaaaactttacctgcaaaagacgtgactactgacaaagaaggcattgctacattggatgagattcctcatggtacaaaagtaaccattaccgaaaaatcagtaccggcgccttatacgattgataccacccccatgactaccaccattaaagcaggcgaaaccatttacgtgacttcaaaaaacgcacgggaaaaagggcaaatcattctggataaaagcggagttgaaacagggagtgatctttggaatgacaattattccttagctggtaatacgtttgccattcgcaaagacagtccaaccggtgaaatcgttcaagaaatgaccacggatgaaaacggtcatgcggaaacaccaaaagagattgctaatgcgttggaattgggaacctattatgtgaccgaaactaaagctagtcatgggttcgtgaatacgttcaaacctgtaaaagtcgaattgaagtatgccaatcaaaccgtagcccttgttaccagtaacgtaaaagggcaaaatcaagaagtcactggcgaaaccactttgacgaaagaagacaaagatactggggataaagcacaaggtaaggcagtctttgagggtgctgaatacaccttgtttactgctaaggatggaaaagctgttaaatggagtgaggcttttaaaccagagttagcgaagggaacgaaaggttctgatgaaacggtcactttgactttagacgaaaagaaccaagttgccgttaaacatttagctatcaacgagtattattggcaagaaacaaaagcgcccgaaggatatagccttgatgaaacaaagtatcctgtatccatcaaaaaggtggatgatagcgaaaaaaatgccgtgattacccgaaatgttacggcaaaagaacaagtgattcgctttggctttgatttctttaaatttgctggatcagctgcgggcactaccgaaactggcttcaatgatctgacctttaaagtgtcgccattggaagggaccaatgaaatcacaggtgccgaagatgaagcgaccacagcttataacgagcaattagggtttgatggttatggcaagtttgaaaatcttccttatggggattatttacttgaagaagtagaagccccagaaggttttcaaaagattacgccattagaaatccgttctacttttaaggaaaacaaagaagactttgtgaagagtgagtatgtctttaccattaccgaacaagaccaaaaacaaccaattaaaacggtgaccgttccttacgagaagctgacgaacaaagcattttctgttagtttgaaccgtttaatgctctatgatttgcctgaggaagaagatagtttaacttctcttgcgacttggaaagacggaaacaaagaattaacttctctggattctaccgagctagttgataaattgagttacaatctacatgaaatcaaagaagactggtatgtggtagcgcaagccattgatgtggatgcgacaaaagctgcccaagaaaaagatgaaaaagccaaaccagtggtgattgcagaaacaagcgcaacgttggcgaacaaagagaaaacaggaacttggaaaattcagcataaattaaccgccgaacaagttttaaataaaactattgtcttattcaactatgtgtatgaaaataaggaagcttttgaagcaggcgataagccagtagcgaaggatgttagcttgaataatcaagcccaaactgttaattgtacggtggaacgtcatgtttctatccaaacaaaggcccacctagaaaacggttctcagacctttactcatggtgatgtggtggatatgtttgatgatgtgtcgattactcatgatgtactggatggctcaaaagaagctttcgaaacaattctgtatgctttattaccggatggtacaaacaaagaaatttggaaatctggcaagattgattatgaagtaaatgataaagaattcaccaaaactgtgcttgcgaaaaaagtagataccggaaaatatccagaaggaaccaagtttacttttgcggaaatcaattacgataaagatgggaatatcaatggaaaacacaatgaagatttgaaagaaaaatctcaaaccttaacaccaaaagaagttccaaccatactaagtacgccgaaacaaccggaaacaccaactgttccaagtggctctcaagaatctagtcccacagtgaagaccttccctcaaaccggggagaaaaattccaatgttttactgttcattggttttactttgatttttgcgacggcgggctattatttctggaatcgccggaactaaggtgatgagatgatacaagtaaatcctaagaaccaacgtgcgcgaccgcctcctaaaaaagtagtcgcgctatttttgtatccaaaactaacaatgaaaagaggaaaagaagatggaattgaaatttgtcgtgccagatatggctgaaacctttggaaagttaagttatgccggtgaaggagaaattataacagaaggatatggacggaatactacggtgattggtcgcagttatcatttgtattccagtaagcaacgggccgatgatattgaggtggtagtagctgcggaagccggtgaaaaggattttgatcaagaccaaccgctaaaagccgtgaatccccatttggttgccaaaggctatgagattgagaatcgtgggtttactgattacgtgttgtatgttgatgatttagtgaaagcataggaggaaaagaagatgagattaacagaaggtattgtcgtagattcaggtttaacatttgggaagttgcgtttttccgcattacgccgagaagtacggaagcaaaatgaggatggaacaattggtaatgaggtaaaagaacgaacctataatttaaaatcctctgcacaagggcgaatgattcaagttagtatcccagctaatgtacccttacgcgagtttgcttatgatgcagaggtagagttggtcaatccaatcgtggataccgttgccaattatgtttttcgagaaggaactaccgttaattggttcattaaggcggatgatttagtcttgaagcggcagccgaatcaaggaaatcctacgaaccaaaatgaaagaaagaaataggtgaagattatggaaattaatgttgaacatattttagattgtctcgatcaatatggaaaaggcgagctgactgaggaacaactcgttaaagcattaacctctgatgaaaaaatgtttctgattatacatcaaggtttacttggagaaaatagcgacagtgaagaagactctgatgtactagactggttaggagaagaagagtctttctttatagttgtcgaagtaaatgaaaacttatgtcggcaggcagaatccattttggaagaaattggtgtggagatgccggatgctattgaaggctttttaaatcaattggttgaaacgaaacaactcccctcctcgtagcagtaaatgactagcataactttttgaaattgcctaatgaaatcctattgggctttttcgattggaggtggaaaccatcaaaatgtacaaaggacatcgcatacgcgcaggagatcagcacttggtttatcactttgttcttggctggctactcgctctgttcatcggttggatgagcgtcttttattttcaagagtttagacaatttgatatttctaagctatcactttctactattgaaatcgtttggtctataaaagatttagtatgtctgcttggaagtctcgctttttcaggagctatgatattgctttatattcacttttttcctgatcattggcgaagcttgtggcatcgacaaaagctagctcggatgattctagagaaccattggtatgaagtgaaacaaactcaaagtgaaggctttttcaaagatttgaatagtagccgaaccagagagactatcagttacttccccaaaatctattatcgaatgaaagatggattactgtctattcgcgttcaaatttcacttgggaaataccaagatcagcttttaaaattggaaaagaagttagaaagcggactgtattgtgagttagtagaaaaggaactcaaagactcctatgtggagtatactttactgtatgatatgatcgccaatcgaattgggatagacgaagtagtggcagaaaatgggactctgcgattgatgaaaaatcaagtatgggcttatgattctttaccccatatgttaatcgctggtggcacaggtggagggaagacctatttcctcctcaccattatcgaagcactattgaagtcagatgcagaattgtttatcctcgatcccaaaaatgcagatttagctgatttaggtacggtgatgcctcatgtttattcacaaaaggaagaaatttctgcttgtgtggaagatttctatgaacgtatgatggctcgtagcaaggcaatgaaagaaatgtctaactacaaaacaggagagaattatgcctatcttggacttccacccaactttttaatctttgatgaatacgtggcttatatggagatgttaacgacgaaagaaagtgcggtgattttgaataagctcaaacaaatcgtgatgttgggtcgtcaatctggtttctttctgattttggcttgccaaaggccggatgcgaaatatttaggagacggaatccgcgatcaattcaactttcgcgtggctttgggtcgtatgagtgaactcggatattccatgatgtttggggaggtcgaaaaaaacttctttatgaagcacatcaaaggtcgaggttatgtggatacaggtggcagtgtgattagtgagttttatacgccacttgtaccaaaagggtatgatttcttagattcaattagtaaattagtaaattagaaaagatgaatgattgagtgatcttcaatactgactttatacttcaagtaacgtataatacttttatatagtaggaagaaaggggataattaatatggaaagtaatgattcttatttagagtatgcaaaagcaaataaggataagtttatttcttatattatcaaagggaaatcccccgaagttggacgagacgcagtttttatggcagggagtcctggagctggaaaatcagaggttgccattggattagctgagaattatgataaccatgtgattattgatgcggattactttcgcacccagtttcctgattataatggaaaaaactctagtctctttcaaaaagcatcttcttggttggtagagcaggcatttagatatgtcttagatcatggctattcttttattctggatgcaacttttgcaatattaagtgctgaaaaaaatatctcgcgggcgttgaaaaaacattttcgagtgacgattttctacgtttatcaagaccctaaaatcgcttggaaatttacacaagaacgtgaaattgcagagggacgtcatgtgccgaaaaaggtatttattaacgcttttttcaaatcaagagagaacattgcaaaagtaaagagtaaacatccagatgtattgcttcatatcataataaaagattatacgaataatatttccgaagttcattatgctgcggacaatctagaattatttttaccactagggtatagtaggaaagatttggaggttcaattacatgactgataaagaacaagtaacgaaaattgtaaagaaatacaataagagcattgcggatttatcggaaaatgctactgcaaaagagttcaaaacggtgattaaatatgtagccgatcaggccaatgaaaaacaacggaaattagttggattaaataaaaaatagtaggacaaattaataatgtatgagccaagagcaaaatgttcttggcttttttctttgcaatgaatgaggtaatgtatgagatttttagatttattcgccggtattggtggctttcgtttaggtatggaacaggcgagccatcattgtatcggtttttgtgaaattgataaatttgctagacgtagttataaagcaattcatgatacaagtaaggaggtggaaatgcatgacatcacaagtgtatcagatgagtttattcaatccctcggaccagttgacatcctttgcggcggatttccgtgtcaagctttttcaattgcgggaaagcgacaaggattttccgatactcgaggtactttattctttgaaatcgctcggttcgccgctcttctccgacctaagtttttattccttgagaacgtccggggattgctcaatcacgaagggggggctacgttcgagacgatcctccgaacgctggatggattggggtatgacgtggagtggcaggtgcttaactcaaaggcctacattccccaaagccgggagcgtatcttccttatcggacattctcgagacgcatgtaccgaacaagtatttcctatcattggaccgtcttcaacatctgatcaaaacatcagaaatttggtaaatatcaatccttccaatcgaggaatgggtggacaagtctatggttcagatggcgtagcgccaaccttaacaggtgatgaaggaatcaaaattgcactgccagcaagggatggaatctctgtagcaggactattaccgggaaagtttgaacaaggtaatcgagtttatgaagttactggaaccgcccccaccttgtccacgaaacaaggtggtacaaaaatcatgattcgaaaaaatgaaacagaatatcaagaggtgaagccaggagacagtgtgaacctggcttttcctaattccacaagtcgccgaggtcgtctgggaaaacagagtgttcatactttactgacaggagaccaacaagcgattgtcacggatcagtatcaaattcggaagctaacacctagagagtgttggcgacttcagggctttcccgattgggcttttgatcgagcttctcaagtcaattcagatagtcagttgtataagcaagccggaaactctgtaacagttccggtcatttttgatattgccagaagattaaaggaggtacaaaagtgtgatttatgatgagttggttggagaaatttattgggtgattgaaaagattcagtcagacccagaattagaagaacaattgcgacggttaaactttgatattcgcaagaatggtgtcaaagtcgctggcgatccatatttaatgaatgaggagacggatgctcgaattgaaataaaccaagtaattgcagaatttgagcggattgcggaccaagcaaaagaaccggatattcgtcaatacttgttagaaatgaaagcagagttggaagtaaatggtattacagatgagtaacctaaaccaacacaactgactgttaggcgctgaccgcggaggattcgcgaagcagaaatcctccgtggtgctgtgcctgttcatggacggcgttagccggccatgatgtctcaccccccgtatctaacaggggggtacaaaaacacaaaaaacaagcaagcagcgattaagaatggttgtcatgacgaggatagttagctgtttgaacaggtgttaactcattttgaaaagttaacaccttatttggaggtgaaaacttggtacaacagaacttagattatcgtttactaaaagatcggcgcaatcaatatggtgtttctcaaaataaattggctactgcttgtggattgagtcgtccctatttgaatcaaatcgaaaatggtggcgtaactacatctacaaaaactatgagaaaaatttttgaccaactggaaagtttcaatcccgatttgcctttgacgttactgtttgattatgtaaggattcgttttccgacaacggatgttcaaaaaattgttcaagagattttgcatttgaaatttgactatatgcttcatgaagactatgccttttattcgtaccaagaacaatacatcatgggtgatattgtggtgatgctttctcatgaggaagagaaaggcgttcttttagaattaaaaggtcgtggttgtcggcagtttgaaacttttttgctcgctcaaaagcgtagctggtacgactttttcgatgattgcttaaaagctggaggcgtcatgaaacgcttggatttggcaatcaatgatcgagttggcttattggatattcctgagttgacgaaaaaatgtcagaaggaagaatgtatctccttattccggacttttaagagttaccgctcgggtgaacttttgaaagctgatgaaaaggatggaatgggaaatactttgtatatcggaagccttaagagtgaggtttatttttgtttatacgaaaaagactatgaacaatatatcaaattgggaattccgttagacaagagcgaaacgaagaatcgctttgaaattcgattgaaaaatgaccgtgcctaccatgcaatacaagacttgttaaaaggtcgaagtattgagggtaccacattttccattatcaaccgttacttacggttcacggataaagttgaagggaaacggcgaacaaactggccgctaaatgaacgatggggtcgctttatcgggcgaaatcgcaaggaaattcaactgacttctgaccccaaaccttatactatcgagcgaacactgagctggctaggtcgacaggtagcacctacgtggaagatggctaaggagttagatcggttaaatcagacgacttatattcttgatatggtacagaatgctcagctatcggatcggcataaaaagattttggaacaacaaagtatggcaatagaaaacttgattatatgaaaagaggaagcagtatgcttggtattaccgtgatgtgcttaattcatacaagtgcggctgcagatcgagtaatggaaaggaaagtgataaaatgaatttcggacaaaatttatatcaatggtttttaaccaatgcccaatctttagtcttattggcaattgtggtcattggtttatttttaggcttcaaacgtgagttttccaagctgattggttttttggtgattgcgctgattgcggtaggactggtcttcaacgcttctggtgtgaaagatgtcttactcaacttgtttaatcggattgtcggtgcgtaagggggaccattatggagcagatgcgtgtatatattgcgaaccttggaaaatataacgaaggtgaattggtgggggcttggtttagcccacctgtcgattttgacgaagtgaaagaacggattggtttaaatgacgaatacgaagagtatgcgatccatgattatgagttgccttttgagattgatgaatatacaccaattgaggaaatcaatcggttgtgtggtttagcagaggaactagaaggaacaccgattggtgaagttgctttggaaatccaacatgctttcttcaactcttttgaggaaatggtggagcatgtggatgatattatctgttatcccgattgtaacgatatgagtgatgtggcgtattatttgattgaagaaacaggtgcttttggagaggtgcctacacacttgcaaaactatattgactatgaagcatatggacgtgacttggaactagaaggaaattatcttgtgacaaatagaggaacatttgaattcataggataaacattttcatgatataggtttagggatataattattgataaatatataatgctggaggttatgattattatgaattttgactttgaccttaaatcatttatagacatatttgtccctgtactaacttcatttgcagtatgttttatcacacttttttttacaaataaacaacataaaaaagcgatgaaacagcaagagagacaacatgaggaatcacttgatttatcaaagcaacaatatgctgatgaaaaacaaagaaatgaagagcaggaccgtctaagttattacccttatttaaaacttatacccaaaatatctgaacaccgttttgctggtaaaatggtaaagtctgacgaaaatgatgtttttaaattaccatttgagcttattaatgaaggtctgggaatggctttttcaattgactttgtgtatttagaagaaactatcaacacaaacgaccatgaagtaaatctattatcattactttcggctcaaaaacatattgatgatagtctggatgcgttaggagtttcagcgcctattgatacagatattctaagagtagggaaaaaaacagaatttgaattatattggatgaaatataataacgaagtaatgagtatccctaaagattcagtgagtaaatgggaaataaaaatacggtttagtgattttcaagatagaatatatcaacaaagatatacttttattacttcagctggataccaagaaatccacagattatggtctgataaacctcagttgatagattgaaagttggaatacacttttaaaaagaaaattaatattcatgcagagtcgtctttatcaggcgcttttttaggaagtgaaactaatgaaaaaaataaaaagctataccagtatctgggcagttgaaaaagtcatttacgcaatcaatgactttcagctgccttttcctgtaacctttaatcaaatggcttggtttgtcttatccttgctgtttgtcattgtgtttgctcatatgcctccactatctatgatagagggggcatttttaaaatacttgggcatacctgtggcagtcacttggtttatgtcgcaaaagacctttgatggaaagaagccattagggtttttacgatcctttattagttatcacttgcgatttaaggttacttttgcaggaaagaaagtcaaagaacagaaaaaacgatgggatgaaccaatcaccctagtgaggagtgtgaattatgtacccgattaaatatattgaaaataatcttgtttttaaccaagagggagagtgctttgcttactacgaactagtcccttacaattactccttcttatcacttgaacagaagtatcaagtccacgataactttcgccaattgattgcgcaaaatcgtgaaggtaagattcatgcgttacaaattgcgacagaaagcagcattcgtgccacgcaggaacggtcgaaaaaagagataactggtcgtttgaaagaagtcgcaaaacagagaatcgacttacagacggatgcattggtatcgatgattggcgatagtcaaattgactatcgcttttttattggcttcaaactgattgtcacagacgaagaagtaaacctgaaaagtctcaagaactcttttttatccggacttcaagagtttgtctatggagtgaatcatcatttgatgggtgattttgtttcgttatccaatgaagaaattcgccggtatactaagcttgaaaaattgatggaaagtaaattggctcgtagattcaaagtaagacgagtaacacctagtgatctaacttatttgattgaacacatttatggagaaaaaggaacaccatttgaagaatatgaatttcagttgtctaagaaaaagctaaaatctgaaacattgataaagcgctatgacctacttcgcccaagtcgctgtttgattgaagagaagcctcggtacttacacatggaacatgaaaatcatgaatcttatgtggcctatctaacgattaatacgattgtcggtgagatggagtttccatcttctgaactcttttattaccagcaacaacaattcactttcccaatcgacacgagtatgaatgtagaaatcgtgacgaataaaaaggcactggcgacagttcgcaataagaaaaaagaactgaaagacttagacaaccatgcgtaccagtccgacaatgaaaccaattccaatgtcttggatgcgttggactccgtggatgaactagaaacaacgttggatcaatccaaagaatccatgtacaaattaagctatgttgttcgagtgagtgcagaatcattggatgaattaaaacgtcggtgtgatgaggttttagatttttatgatgataccaatgtaaaattggttcgtccctttggcgatatgatgggacttcatgaagagtttttgccagctagcaagcgatacatgaatgactatatccaatatgttacttctgattttcttgctgggcttggctttggggcaacccaaatgttaggagaattggagggaatttattttggctacaatgtggatactggacgcaatgtttatcttaaaccggcattggcttcacaaggggtcaaaggttccgtcaccaatgcactggccgccgcttttcttggttcacttggtggtgggaaatcctttagtaataatcttttagtttactatgctgtcctgtttggcggtcaagcggtgattgttgatcccaaaggagagcgtggtagctggaaagaaaccttaccagaaattgcgagtgaaattaatatcctcaacctaaccagtaaaccagaaaatcaagggttacttgatccctatgtgatcatgaagaaaaagaaggattctgaaagtctagcaattgatattctgacttttctaactggaatttctagtcgggatggagagaaatttcccgttttacgaaaagctattcgaaccgttacccaaagcaatcaacgtgggttgttacaagtcattaccgagcttcgaaatgatgggacaccagttgcggaaaatattgctgatcatattgaatcgtttaccgattatgattttgcgcatttacttttttcagatggttcaattacacaatcgattagtttagagaaacaattgaatatcattcaggtggcagatttggttttgccggatgcggagactacatttgaagagtacactacgatggaattgcttagtgtttccatgttgattgttatctccacatttgccttggattttattcatagcaatcgagaaattttcaaaatcgtggatttggatgaagcctggagcttccttcaagtcgcacaaggaaaaactctttcgaataaactagttcgtgctggccgtgctatgaatgccggcgtttactttgtcactcaaaatagtgatgatttattagatgaacgtctgaaaaacaacattgggctgaaatttgcctttcgaagcacagatattcatgaaatcaagaagacactcgaattctttggtcttgatcaagaagatgaaagcaatcaaaagcgtctgcgagatttggaaaatgggcaatgtttgatgcaggacttgtatggtcgcgttggtgtggtacaagtgcatccagtctttgaagaactcttccatgcttttgatacacgcccgcctgttcaaaagagaatggagtgaggagatgaaaaagaaacttttacggattgtgggaataattgcaattagtctctgcaccattttacttcttttgagtctgattggaacagtagcggaagcaactggattagttgatgataccgttaaatctggcaatctctattctcaatattcacttgataactatcaattggatttctttgtagatagttcgtggggctggctgccttggaactggggcgatgggttaggaaagagtgtgatgtacggtctctacgccattacaaatttcatttggaccgttagtttgtatttatcaaatgcgaccgggtatgtggtacaagaagcgtacaaattagattttatttcggatacggcagaaagtattgggaaaaatatccaaacgctagccggtattactgaaaatggattacaggtctcgggtttctattttggatttctattattaatgattttagctctaggagtctatgtggcgtatatcggactattaaagcgagaagctaccaaagcagtccgggctgtcattaactttgtaacgatcttccttctctctggttcctttatcgcgtatgcgcctacctatatcacaaaaatcaataactttagttcggatgttagtgaagcggctcttagtctcggaacagagctcgttgtgccgaattcggaaagcaaaggaaaagacagtgtggatttgattcgtgatagtttgttttctattcaagtccgacaaccttggctcttgttgcaatttgatgattccaacatagaagaaattggtgaagaccgggtcaataaaattttatctgtgagtccagatgaaaataagggaaaggatcgagaagaagcggtaaaagctgaaattgaagacaatgacaacgcgaatctaagtattacaaagaccatgaaccgactagggaccgtggtctttttggtgttgtttaatattggtatctcattctttgtcttcttactgacggggattatgttgttctcccaaattctctttatcattttcgccatgtttctgccaattagttttctgttatccatgttaccaacttatgagagcttgggaaagaaggcgattattcgtttattcaatacgattatgatgcgagcgggagttaccttagtcattacgactgcttttagtatctccaccatgtttttcaatatttcagctacctatcctttctttatggttgcgttcctgcaaatcgtgacctttgccggtatctatttcaaattaggtgacatcatgagtatgttcaatctccaaagcaatgatagtcagtcaatgggaaggcgcatcatgcggaaaccgcacatgttgatgaaccgtaaattgcggcaactcaatcgaaatgtgatccgaactctggcttttggcggtggtgcagcagttggacataagttggaaaaggaacaatcaaaatccaaatttaagccatccggttcttctctacgaaagaattcacgattacctaacgatcacgaggtaccatctgactcgactaaggagaatccagtttcaaataataagaaacaatcccgaatgaatttggctgggagaaaaatgggcaaagttctggatacccaagctttggtgaaagataagactaaacaagtaagggatcaggtaaggaatacgccgaccaacttgaaatacaacttccacaaaggaattgaaaagacgaaaaaagcaccgaaagaattcaagcgcggacttgtccaagaaaaagcaaatcgagcggagttgagagaaaaacaacgacaacatagagatgaaaaaatggctgaaaagcgcaaagtattgaacgaaaccggtaatcgtcataagaaaagaagggaaaatgtttcgataaaaccagagcgccaacctcaaaaagatagagcgccaaaaaaagaagcaccaaaacagattgtgagagtaaatccgaatcccgaaatcaaacgaaaactatctagtcatgaaattgtttcaaaaagaataagtcaaccatcaagtaagaaaaattctttccaacaagtgaaacagaggtctactctgcccaagcgaaccaatcaaaaagtacaaaaaagaatgaaccctcgtccaaaatcaaggtcgggtgagaaaaaatgaatgtaaagaaattaagtatcatttcgttaaccatcttgacactctcctttatggtcgtcttgatgtgtgtgggcttgttgtttggggaagacagtgaaggaagtaatagttcaggtgcttcttctgggggaagtaatgtctcagaagaagttttgaaacaccgagcaatggtggaaaaatatgccaaggaatcaaacatctcagaatatgtcctgattcttttggcgattattcaagtggaatctggtggcacaatggaagatgtgatgcagagttcggagtcagccgggttgccaccgaattcattaagtaccgaggcatccatcaaacaaggatgtctctattttgcgtctttggttaagcgttccaaagaactagggtgtgatcaagatagcattattcaagcgtataactatggtggcgggtatctggatcatgtcgcgaaaaacgggaagaagcataattttgctttagccgaatctttttcaaaggaaaaatcgagcggccaaaaagttgattaccctaatcccatagcgattaagaaaaatggtgggtggcggtataactatggcaatatgttttattgcttattagtgaagcaatacctaactacaacacagtttgatgataaaacagtccaagggatttttgatgaggcgtttaagtatgaaggaacggcttatgtgtttggtggagcaagtcccgaaactgggtttgattgtagtggcttgactcaatggtgttatgccaaagttggtctgaaacttcctcgggtggctcaagatcagtataatgccatgacccatattgatgtaaaagatgccaaaccaggtgatttggttttctttcattcgacttatgatgccggtacttatgtgacccatgtcggtatttatgcaggagagaatcgcatgtttcatgcaggagatccagtgggctggacaaatctaacagaaagctattggcagcagcatcttatcggtgctggacggtacaaataagagaaaagaggaaaaaacatgaagataaaaattgaacggaatcaaaaggaaaagagcccaaaaaagaataaagaacgagtcatttcagtgggcaagcatcgaaaaatggtgcttgctctttggcttttattgtcttgtagccttgcttttggaatctacagaaatttcacagccattgatcagcatacgactcatgaaaaagtagttataaaagagaaggtagtgaatacttcaggcgttgaaagttttacagaggattttgcgaaagaatatttttcatggagaaataacaaggaagcaattgaaaagagaatgagtaatctcgaacagtaccttacagaaaacggtctcgctttaagccaagatatggttcgagcagatattcccacgagttccgaagttcaatctataaaaattctagatgttgaaaaacactcggaagaatttatcgtttcatttttagtcgagcaacagattacagagggaaaaaagacacaatcaatttcttctgcatatcgagtgacaatctttgaagatgaaaatgggagccatatagtaacgagtttgcctactatgattgcaaagccagaaaaggcaaaatatgaatcaaaacaaataggaatcgaatctgacattgatgctaaaaccacggaagaagtcaccgattttttagagaccttttttaaactgtatccatcagcatcggaaaaggaacttgaatactatgttgaaaacaaagcagttcagccaattaatagtaatttgaaattagttgaattggttaatcctacttttaaactgaaaggaaaagaaattcaaggagaaatttttgttaagtatcttaataatacaactaaagtaagcaatatctttgaatttacccttactctccaaaaggtaaaaaattggaaaattatagatattggataaaaattaatctataattagatgtttagcaaaagcatattcataaatatgatacttagaaaaaacaaaactataatagttgtatccgtcatttccaaatttcaattttcacatgcctattcttaatagcaaactcagtgatttttattgcatcagaaagatttagtttttctacatttctctcgccactttttagtttttttgctgtacttaagctaatccctgatccagatgctatcgcgtttgcggtagattcttgtaaaacttctttgattaatttaatatcagctatttcttgattcaaaaatcttctctcctttctcagatagttaatttggaaaaactttaaggggactactgtggtctttatgatgatttatcagaggactacagtggtctttttaactagtaatagggactctagaaaaagtttaaactttttccatatagcttgttttgcaaattaaaattaatatcacaaaataagtgttaatttttcgactttttgcgtttatcttaaaccttatttattggtattttagcatgctatatacatgtcatacaagaaactataattttataaattctaggaaagctcctacttggttaattcgttttaaacaatcgtcttaaaaagagctcttaaagatttcataatctttagagcccactactactatattccctaatccatacttctaataaaatgctctttttctttttagttcccaaataataaggttttcggatcaactaacatgctttgagaaagactactatctttgcaaatttccaaatggaggtgtggtcctgtactattcccagtacttcctacatagccaatcatttgtccttgcacaacgttgtctccagtttttactaagtattgttgttggtgagcatataacgctgttgatccatcttcgtgttgtataacaacgtaatttccccaagaatagtgaaactctgctttaataactttaccagctttaactgcatgaatcggttcaccttgtgcagctgccatatcaagtcctcgatggaactcatctccacgatttccaaacaaactagatattgaataattatgaataggtatttgatatccgttcttattcatttgtggtccttgaacttctttgtcatagtcagttaaatcataggttttaattaatccatttagctttaaatagtattgagtatctgttgcataccgtcctgtaaggaatttagttgcttctcgatatgttttactattagcttttaatgctccggcataaaaatctttatttccactaattcccttagttaataatttggcataatcttcaaaactttcctcatagttttcatacactctaaatttcgattgagtcttataaagcgttccattacccaaatcttcgtttgttaccattatgacaaagcttccattataagttccttttatcccaaataaattgtaattcggtgcctgagctaattggctttgaccactggcagattctaagattgcttgtgcaatcataacagaagcatataaatcatatttctgaccaatttttctcgcagaatcaccaattttcataataaaattttctacagactcatttttgtcaaaatgaatttcttcattaccagatagtactggttgtgattggaaagtttctgttgattctatttgctgtgatgtcgaaaaagtttttgtttgtccttccgtttttggcgcttccttttttgaagactctatatggtttggctttgtaactttcgaagaagttatttcacttgtactacttgaagttgttgaagattcggtacttgaaatcgtactactttcacttgatgaagttgttgaagactcggcatttgaagtcatactactttcacttgatgaagttgttgaagactcagcatttaaagtcgtactactttcacttgatgaagttgttgaaaattcactaccctctgctgttacatcggaattactcatttcagtcgtcttggttctttcttttgcaattttgtatgttgaattttcgcttgccaacacatggaaaggtgttgctataaggagatgggacattaatagaactgctgatgcaagttttaaagattttttcatttgatttacctctcttttttttctttaatagtgttttctattaaaaaatatgacaaatattttcaatgaattgagtaatacagtatatttcttgatttcatttagtaacgattatgctccactatttaatcctgttactgcctttaaaataaaattatagggttgactaaaactaggatgaaataaataatctaacattttcaatttgtctaatgtaatttgttcttctatagcaagagagaacattgtcaataatccagatagatcttcttgactataaaattgtacacctactattctctttgcttttttttcaaaactaattcttaattttacaatattgtttgttttagaaaaaatcggtctaatataatcttctatttctatataatctatagcctcgcttaataagcgtgctgtttttaaattcaaacctgctgcataaaaattgtaaccaaatatagaaaagccatttgtgaattgagaccccgaaggtgtaaaactttgatcgttaatatgttgagttgcaatataagccgttcttagagcattagagatagaaaaatcaacgctacttctattaatggatgtaaaaaaagttgtagcacaatctccaatagcatatatgtcttttatatttgtttgttggtattcatccgttagatatgctccactaacatctctcaagaactccttttttcctattggactatgagataggaatcctatagcttgtatgaccatatccatagcgtatttgttatctcttgtagtcactattttttcaatcttttcttttcctaaatactttttaggactttctgatagacaaagatgtatcccgttttttgatagtatttcttcaactttatctgaaaaactacggtcgtaataggtcgacaacactctatctgcaacatcgaaaagatatacttctttccctctttttcttatagcttcagcaatttcaactccaatatatcctgctccaataatacctacttttttaatagtattatcatctaaagctttgaaaatctctttggcatttggaaaattctttatcgaaaaaatattagctaaattattccccggtatatctaacataatttgctttgaacctgtagctaatataagtttgtcatattcttgggaaaatcttgtgccatctttttttacacaactaatctttttattttgaatatcaattttgtcaacttctgtctctagaaataacttttttatctcagaatttagtgtcattctattttgataaaaaagatcttctaaattacttacttctccttttataaataacgatgtcccacattccaagtaactaatttctgattttttatcgattagaataacttcataatttgaatcgcttaagtttagaaatcgagctgcggctagccctgaatggtttgaaccaataattactattttttccacttaattacattcttttcctttctataaaaagtatattcatctttaactaacacttatttcccatcataaaaaagcaaaaagaggaagaaaaagattcttcctcttctcagagaagacttaagaaattgattttctattcattctctttttttcgatttttataccctaataatcctaacgttcctaacagtattaaaccaccgctaatagtaaagatattactgtcactctctcccgtcttaggaaaaacttttgaggactggcttttgcctctatttttgtcttgattgctattgccatcttgattgtccgtcttactacctttactaccgttttttccactgtcttttttgttggaagaaacaactacattagtaggttcactagtattaccagattcatccgttgcagttactctcacttttgtccctgcctctaatttaggaactttaactgtaaaattaccattcttatcagctgtcccatggtattgacttccgtctggtaatgtaactgttacctctgcatttggttcagttttaccagtaacaatttggtcaccctctgtaataggatcaacttgaggtttattcggtgcttttttatctactacagaaatagtaacttctacttcttctttagatccatctggatatgttactacaacagtgccttttttgtttccagctgtactaacatctactttttctttccaagtataagtagttccttttggtaaatcttctttgttcttaattccctcagatgcatctggctctttatttaagtctgtcgtcactttttgtccttcaggattgtatttatctgcatcggaacgagtatctgtcactgtaacgtctacttcaacttcatcagatgatccatctggatatgtcactacaatagtaccttttttgtttccagctgtgctaacatctactttctctttccaagcataagtagttccttttggtaaatcttctttgttcttaattccctcagatgcatctggctctttatttaagtctgtcgtcactttttgtccttcaggattgtatttatctgcattagaacgattgtctgtcacttctactggaactttcactgtatctttcgtaccgtctggatacgttacttcaatgacaccttcgtaattgcctggtgtgttggtatcaattgtaccgccaggagtaacatctgttactgttgttccttctggtaatgttggcaaattagtaacattatctgttaaatctactgtgcctccaatttctactttttcgccttctactgttggttcatatttatcggcgtcagaacgattatctgtcacttctactggaactttcactgtatctttcgtaccgtctggatacgttacttcaatgacaccttcataattgcctggtgtattggtatcaattgtaccgctaggagtaacatctgttactgttgttccttctggtaatgttggcaaattagtaacattatctgttaaatctactgtgcctccaatttctactttttcgccttctactgttggttcatatttatcggcgtcagaacgattatctgtcacttctactggaactttcactgtatctttcgtaccgtctggatacgttacttcaatgacaccttcataattgcctggtgtattggtatcaattgtaccgccaggagtaacatctgttactgttgttccttctggtaatgttggcaaattagtaacattatctgttaaatctactgtgcctccaatttctactttttcgccttctactgttggttcatatttatcggcgtcagaacgattatctgtcacttctactggaactttcactgtatctttcgtaccgtctggatacgttacttcaatgacaccttcataattgcctggtgtgttggtatcaattgtaccgccaggagtaacatctgttactgttgttccttctggtaatgttggcaaattagtaacattatctgttaaatctactgtgcctccaatttctactttttcgccttctactgttggttcatatttatcggcgtcagaacgattatctgtcacttctactggaactttcactgtatctttcgtaccgtctggatacgttacttcaatgacaccttcataattgcctggtgtgttggtatcaattgtaccgccaggagtaacatctgttactgttgttccttctggtaatgttggcaaattagtaacattatctgttaaatctactgtgcctccaatttctactttttcgccttctactgttggttcatatttatcggcgtcagaacgattgtctgtcacttctactggaactttcactgtatctttcgtaccgtctggatacgttacttcaatgacaccttcgtaattgcctggtgtgttggtatcaattgtaccgccaggagtaacatctgttactgttgttccttctggtaatgttggcaaattagtaacattatctgttaaatctactgtgcctccaatttctactttttcgccttctactgttggttcatatttatcggcgtcagaacgattgtctgtcactgtaacatccacttcaacttcatcagatgatccatctggatatgtcactacaacagtaccttttttatttccagctgtgctaacatctactttttctttccaagtatacttagtatcttttggtaaatctttcttatttttaattgcctcagatgcgtctggttctttattcaattctgtagtcactttttgaccttcaggattatacttgtcagcgtcagatttatcatccagttttgttgcgcttgatacaaattctgtatcatctgccgtaattggttgggttgcttcttctggccattttgcatctgtgtaaccatcttttgcttttaacaccggaagtttatcttctggcaagcttacgccatctttcactgcaaagactgttgttccactttcaatacttgttccttcccctgcggtgaaggttactttgtggtagcctgctggaatgttttcccctggattttcaatgatatcatccagttttgttgcacttgatacaaattctgtatcatctgccgtaattggttgggttgcttcttctggccattttgcatctgtgtaaccatcttttgcttttaacaccggaagtttatcttctggcaagcttacgccatctttcactgcaaagactgttgttccactttcaatacttgttccttcccctgcggtgaaggttactttgtggtagcctgctggaatgttttcccctggattttcaatgatatcatccagttttgttgcacttgatacaaattctgtatcatctgccgtaattggttgggttgcttcttctggccattttgcatctgtgtaaccatcttttgcttttaacaccggaagtttatcttctggcaagcttacgccatctttcactgcaaagactgttgttccactttcaatacttgttccttcccctgcggtgaaggttactttgtggtagcctgctggaatgttttctcctggattttcaatgatatcatccagttttgttgcgcttgatacaaattctgtatcatctgccgtaattggttgggttgcttcttctggccatttcgcatctgtatatccatcttttgcttttaacaccggaagtttatcttctggcaagcttacgccatctttcactgcaaagactgttgttccactttcaatacttgttccttcccctgcggtgaaggttactttgtggtagcctgctggaatgttttctcctggattttcataaatatctttacttacagttactgccaaatcggtcgtacctacagaaccatcttggtaaacaattttgataggaattgttccagtaataggttccgtttctcctacccctttggctggagtgaatgtaacaataccagtatttgcgtcaacacttgcattgccgaagtccttattataaacatctaaaattgaaaaggcatcgttagctagaggaacatctggtttatcaaatgtaggtttaccactttgaattgtcgtttctggggttgttgttataggtacgtatgttgcatcattttccatagcttgagaagcttttacagcaaactctacatctacgtcaaaagttcgatttccgattttaacagttacaatacctttcgtactatcagcaacgttagaagtatcaggctctgttttccatgaatactctgcatcttcaggtaagtttttattattccgaattgattctttagcatctggtttaaatccaactaccacggtttgtttatcaaccgcttttggtgattccttgataacggttgaaccttcttctggtttatcaaaacctggagaaacgatttgaacttttaattcatctttcgcaattaatttatttgaatccacacccgtaaattcaaattctacagtatccgaaattggagctccatctttttcatttggagcaatagttttttctgctaatacagtaccttctttatcaacaagttgagctttgtgacctgttcccgctaactcgtggatgaatactttccccttaactgttgtatcaacatcatatacttcttctaattcaggtttcccgatatatggattcgtgtctccactctcttctttatcgtcagggtttccatcaccatcaatatcttgtaaataataataacctgttccataagtgttctggattaattttttattcgtatccgacaaccaagaatcaaagatgaagtcttcaccaaacggttcatttccttcaacttgtgcagctgttttcatttctgctaaaatttcatctaatggttcagtcaattgaagaacataacgaataacaactggacgtggacttgcattagaaaaatcgataagtttagtcaaatcattattagttattgaacctacaccataattttcatgaccttcccgtcgctcgattgctaaatcagctacttttgttcctgattcaaatgaaacgtcatatactactcgatcagcctgaaccatatgcatttgtatacccgctacatacggaactaaacgttcatcaattttgtagttagcataccaaggcgttcccgttgcagaaaccgagtaagagaaatttttctcttttgttaacttatgatccaagattatagcgccattagcaccagtagaccccgatccatctttcgtttgaacatttggtttctcgtatttggtacttaccgatccgtgtttaaattgatcaggattattttcagatacgtctaacttattatagaaattatcttgatctgttataaagtaaccagtactttctataccaggtacaattttatcattgtcttgatgacttaccagatagattcgatacatcaaacgatcactcttaaggttatcttcaccaatttcttgaaaaatctcatctagattcttttcaaatgtaattaccccgttaggagcagtttgtgtatcagttgtttctgccccagcaaataatccatcgcttgcacgaatataattaactttccaaatgttcgtgggtctacctaatgaatcattgattcggacaaaagttcttctgtaactaatccccgcaacctttttagaatctacttgaatgttttcaacgtacttggctaatcgctcatccaattggaggcggatttcccaattatcggtagaagcagcaatattatgttttccgtaaacttcaaatccaattgtattgccttttagtgtgtctccagttagttcttgaggactaaattgtaaatccgaaaagttataatttttcgtataaccaggattctcctgaaaagtattccccgaagctactttgtcacctacttgtacggagcttatcgctgtttcaagtggggtgcttggagaaatttcatcttgtgctttaactagttcagttgttcccaagacaagaccaacaccaaccaaaacagatgcaaccccaacacttaattttttgatactgtacttcaatactcgtttctttgttttttctagaaatactctcttattattcttgctaaccattattcaaatcaactcccttaatagttattttcctagtaagaataaaagataaatctgatacgtattattcacagaataggaatcttattaaacttatgttaactaatttacttaaagaatttcatgcacattacaacaaaaaaagtacatttcttcatgtttttttcggatatttgtgctttttaaccattcagcagctgaaaacatataaaaagatatgtatgtattctttctgaaattaagttcatttctatgcgatgaagcatgttttcaaaatattactctttcttagattaaacttcagagtattcaaatagcggaataaggagccttatcccgcattactgaatgagactgtgacataagtaaaaaggtgacttcaaattccttcttcggaatttgaaatcaccttctttataattataaagtatcggtttcacagcatttctgaatgattcctagaatcttaaacgaatgattggagttatcaacattttttcactcgtttttagcgaaacaaaaaatgacatttgtcacagcctcattaaattattgattctttttctttataattgaattgtccatatttaaagtgtctagtactctacatgaataattaattgctttcactcaaatacttataatctattaacttgtagttgtttaacttttctgaaaaagttagacccacgtaataatcttcccagctttctctttcaattaactgatccaatttttgataatccataaattcatcatgtattaaaaagaataaataacttgatattttagcatctagcttaatcagattaaataatgtttgcttaaaattgctaccattaatatgactgatagattctctagcttcttcacataaactttttactttattaattactactttgtcatattcatttaacacactattattaccattacttagacgctcagattctacgaaacaactcaaatcagaaatttcccaaaaaaattttttgttaaaatccaatttcctcaactcctccaaactacgtaaatgatatagtctcataataaaataaaacctctcagctaatgttgttgaaattgtccactaaacctaattgatattgcttaggagatacacctgcgtactttttgaatactctcgaaaagtgtgaagaatctgaaaatcctaaacctaaagaaacttcactgatagtatggtttgatttcaacattattttagccgtagaaatttttcgcttagagatataattataaatcgtaatatgcatttcattcttaaagctttctcttaatttagtttcacttacagaaaaataattagctatttcctttacagtaattcttttatagatatttaagccgatgaattgaacgacagaagaaattaagggagaaagatgctctatcttagtttttccgatttccttagtataataaacaatcccagaatccctcacttttaagacctcaggtaacgatacagctaattcgttttcttgtatcaaagcatctctactttgatacgcttctattatatccattcctaatgttatagacgtttgtgctaacttttcaaaaacaatgatagaataatttttttcagaccgaatcgtatctccactaacacttggaattattccattactcagattaaaaaccatgttttctaaatttcgaatatctccatttttaacatattccagtattttattttcataaagaaacagatatatttctggatcgtaattttgtgataacagattatctattttgatttgctcgataattttacttagattttctgtatattcaattaacggtttatggaatagatcttctatttttccagtaaaaaaataatgaactaaaatcagaatatctcgaatgtctcctaaagaatacaaagtcaaattttgcaatgaattatagagtcgttctctatcagccattgcaacattcaaattgttcatttttagtttaaaaaaatctttatcaatattatttgctctaaatggaccaaataagtaatatctggttttaaacatgtatagaagaaacatctcattaaaatcaccagtaaagaaatggaaatctttagtttttttaatattatcagttagtaactttttataatcataaaaaaaataagtagttctatctgagcgatactcttttatcatattgaattcggaattaaaaaccacgataggtaactttaaacaaacatgaagagactttaataagacttctttatctgaaaacacttttgtttctctctttcctttctacatcattaaatagtattttatacgttatctaaaatactattggaatggcaacactttttttgacaaaaattataaggtgttgtgaatgctgcggtgttatggctccgatttcccttgacaatgagcatcctcggatctgattttctccggcagaagcacaatcattcaattacgctgcctctccagaggtatcagatccgcgctcattatcaaggattcgcttcgccaatctctgttgtcgaatttggatcggtgtttcatacgccaacgtgccatgtaagcgtagatagttccaccaatgcacataatcaaacaattctagacgtagctgtgccagtgtctcaaattggtattgatgcacgaattctactttgacagatttataggttgattccgcaacggcattatcatacggacaacccttcctactcaatgaacgagtaattccaaaaccattcagaatctcatgaatggtttggttatcaaattcctttccccggtctgtatgaaaaagcttgacgtctgttaaagaatacggtatccgtccaaaggcttcttttaccaatgaggcatctttcttctcaccacaggaataaccaataatttctcgattaaacaaatcaagtattaagcagatataatgccactttttccccacgcgaacataagtaagatccgtaacgatggcttccaatggctgttcttgtgtaaaggtccgatctaatacattcgctgttttcgcttcattacaagctgttcgttgccctttaaaatgagcgatcgtataggtagatgtcaatccgcggcgtttcatgattcgaccgattcggcgccgactgagttgaagcccacgctttgctaaacacttcttcaattttcgggtaccgtaagcctttcggtttcgaataaactcttcctgaacgatctcttctaagtcggactcattttcgatcggtttcgcttgataatagtaggtttgacgagaaatatttagaattttgcacatcgctgatatggaatatttatgcttgttggcatcaattacttgtcttttcgtccgaatatcagcgccgcttgctttaaaatatcattctccatttcgagttgcttatttttctttcttagtgcgatcaattctgcttgttctggtgttaagttgtctctttctttgaatgagcccgttgattgtgcttgcttcatccatttatcgaaagaagaaggcgtaagctcatactctcgaataatttctgcgcgaggcttaccagcgagatagagatcgacgatttgttgtttgaattcttttgaataggttcttcgttgacgtcttgacatgaaaaatcctccagtgtgttttttattattctacacaccttattttttctgtctagtctagtgtagccgattcactattcctctgtcaaaataagctaacttacttcattataaaatatccacttatcgctttcatgtatattccaccgtaaaaagtacattttatcaccgagaactcatcatttttcatcatgatgaatactatttacatatatctagttcaaagacaataattattatgatccgttattatctaagcactatacagataataggaatttttcgtttctaaatattccaatttgggaatccaataaaaattttcgttcaattacgtgtctattcgaactcttttctagttgttaattatgaagggggaagaaataaaaaatacaatctatacacgaataagaatattatccaaaaggaggttttagaaaagatttattatacgtaaaaagctcaagacattttcttagccataaggacatgtttgatatttaagaagatatatgaattttcttttctaagtataaagataactatccattatcaactaaaaaaacatttttgaaaataaacatcagcagtcctatcaatgcatgtgagcttatagaagttattcgcagcgcagcataattgcattagcttcttttcgtgttttttgcctcttttccctttaaatcttaatggaggaggtgtgcaatatgtcagataacgacgaacgcgtaaatgcccagttgattcgattctttgaaaaggtcattttgaacaccgctaatacttattataaaaaacaagaagaaattcaaaaacatgaacaacttgatcaactcccaccatatttgtttactaaagatactataaaatttaaacaaccgattaatgttttaaatgtgactctccttgttgaagatataaaattagcaaaaatccttcctttgttgaaagaacctgaacaaatttttcttatcgaaaaatttatctttgataaaactgataaagaaattggaaaggttctggggattacaagacagggtgcgacaaatttaaaacatcgactttacaaaaaaattcaaaaaatgctggtttaatatctgcataataactaattttgtatgcttctttgctcgttctcctccttcccaaagaaatagattataagtccatgggaagaaggtagatttatgaattctttaaaagaagatttcattttagcaaaggctggaaatgaagaagctgttgaggcaattctcaaaagatttagctctttgattcataagcaatcctggagaactggaaaatatgatcaagattgttatcaagaatgtatgcttgcaatatatctagctatctcgaaattcgaaattaaagaataactcaactaagggagtctgtgacataagtaaaaagatagtttcaaatttcgaacaataaatttgaaactatcttctttataattataaagtatcgattttacagcgttctataatgattcatagaatctaaaacgaatgattttaattatcaacgttttttaattcgtttttagcttaaaaataacttttgtcacagtctcactcctaaaattactttatttacgtatgaagtgggcaggaggtcgaatccagaactgggctatggtacttcaacgaggacttctcctctagaattgaaaagcatgcgatttaccttccgtaacgacggtagatttattcaactatgtgtccaatcaaaatttgtctgatttcaaaaatagtcaagagaattttggttgttaaaaactcttatctatcaacttccacagtttagttgacaaaccctgatactaagttgggctatgatacacttttcttgactatcagttacgttaccggaaggaatgaactctattgagaaaaacatatgatcgtaaatttaaactaaagatttcacaggatatccttgagaaaaaagtaactaccaagaaaattgctgaagaatacaatatctctcgtctagcaatttcccgatgggtttcagaatatcgtcgatacgggaaaaatgcttttgctggacaaggaaaaagattacctgataaagcagatttctacattcttgaacaggaaaataaacgactaaaagaggaagacgagtgttctacgaacacaaagatcgatacggatctccagggatcactcaaaaactttacgatgaaggaatcgaaatcaataaacgtgttgtagctgttcttatgcgtgaaatgaatttatgcacaagaggatttcatcgacgcaaatcttctcatggtagagaaaaaacaatcaaagaaatggtaaaaaaatgttgaatcgataatttgaacagaaccaaattgatgctgtttgggtgatggatattacttacattccatgtaatgacggtcgcctctatttgtccacctatattgacttagcaactcgtattctacgttactatatggtagattcacacatgaaaaaagagattgtcgtccgtccattacaaatttattaaggagaattgcctacggtaattcattccgatagaggtagccagcatcggtcttttatttatcaagagctgttgaacgaccaccacatcacacattcagtgagccaaactgggactcctgttgacaatgcagtaattgaagcgtttcatcgatcaatcaaatgagaattaatcgactccaacaaatataaaagtaaaatagagatgaaggtgttaatccaaaattatttagaagactactacccaaacaaaagaatccatacaaaatttatgatgactccttgacaatttgaagcgaagaaaataagggatctataatatctagtgttggtgacgccttctgttgccaatactttttcttttttctaataaacgcaaacagacaccttaaaatcctttagaataaagtcgacaaaaaccattcaaagtagtgtttcaagatgtcctattcagagtttaccaaagagttactagatattctagacctaaatcttacctttcatgaagatgcctttcgcaaagagcgcatcaatgacgaaacatgttttgcttttgatggcacattgacctatcaaccggaggaatgctttcatcgccactatcaaaatgaacaaacgatcattaaatagggctggaaaaaagtatccatcttattgaatgatgtcagtaactacaagaccattctgcggattaacaaacagcgcttcaaatgtaaacactgtggaaagacttttttagcagaagattcagttagtgatcgtcgctgctccattgctcgcagagtcaaacaagccattcttgagctattaagcgaacctctttctatgtctttgatcgcacgtatgaagcacatttctccgaccactgtcattcgaatacttcgcagccttcggcctaaaaccatttctttgaaccagctgttaccagaagtggtgtgtttcgatgaattcaaatcagtgaaaaatgtctcgggagccatgagctttgtcatgatggacggcaagacctatcaactgattgatattgtggaaaatcggcaactcaatcctttacgcggctatttcttgcgctaccctagaaaagtccgtgaacaagtacgtctagtggtttcagatttctatacaccctatcgcacattggtgaaagagcgttttccgaatgcccgaatcgtcgccgatcgctttcatattagccaacacatcgatcgggcctttaccaatcaccgaattcaagtaatgaagacctttaaaaaaagggatcgtcggtcgaagcacttaaagaaatactggagactacttcaaaagaatgcgtgggaattgaagggccagcatcgctactggcgtccgtcatttcgagatcatctgacagaagcggagatagtcgatcggctattatcttatgatgactccttaaagcgaggctacgaagtctaccaggattttctttccgctattagaagacaagctgttccaaaattcgtcgcgctcctaaaagaagactacaaggagttgccagagcactaccaaccagtgttcacgaccttcaagaaataccaaacagaaatcaaacgagcgttgcgcgttccctattccaacggccctatagaatgtttgaataaccatatcaaagtactaaaacgaattgcctatggctttagaaactttcaaaactaccgagaacgaatctttttatatcgaggaaaatattttaagaaaactaagaatactacccaactgactaaagccagaacaacaacacggctagacaagatagctgtctagccgtgtgagtatctcgattattctattgaatttcttcaccaacactcattgacgaagagccaaaataagtaatctaaccgactgttaactaaaccattgcaggtcccgttaaagatacttgtgcctgttgtcaccgcttctttttcttgtccacaagcgcttaacacacttaataaagcccctgctattattaataataatatctttttcttattaaaaacctcctcatctatttccagattagtaaatgtagtaatctgtgctttcttttttctcaatactaataactaacttatggggtaaacaaatactcgtttgaccgggttttgagatccatccagttctaaccgcgatttgatcaggactattatcttctttaactcgaattcttccatctttaatctcaacaatattatattgtcccttcgcaggatgataattcacgagtttatgattgatcttatccaaatcgaagcgatccatttccttgccatcaattcgaacgatggcatatttgatagcatcttcagttgtttcattctccttttctatagagaatacaaataagggaataaaagaggtaataatcaaaatgccaataattatgacatcgcctatcttgacaccagcttttcttaaaaatttcattaacgatatctggctaaacatattagactttttccatggaaatggtgaaatttttcggaaattatctgcattaagagaatcagttaaacaaccctcaagttgttccttaatacattgttgatccatcttcataccaataaaaactagtttattaatgcgttcaccaaacaacggatgccaggcttccttcaattcgggatttttttgtataatcatttgacactcaattttaggtaaactagctacccaataatttaatgattcaatacttttatagctacccgatgtttcaaagatcgtcgaaaaatcactatgttgggcaaaccaaagaaacccttttgctcttgtaatattgccaggaaaatttttatccgtaagatgggcaaatttttgtgcgtcaaggagtaaccgatttcgatagataaaacttgagataccatattcttctgtttcaggaatatgattttgatagccaagctctaactctttgaaccagcccactgaataggaagtctcatctatattaaaaagatttgtatttagaattttcgataagtctacttcacctttaattgtcctaattattttggcattggactgtaacttagcaattagaccgttaattttgtaaatcgtcttggttgacactaagtcactattatttaaaagtaatatgttacaacactcgaattgatcaattaacaagccacgaatatcctgttcttcttcaactacattaccttcagcttttctttcctgaatcttttcacccgtttcgaaattatcccaaaaacgttttacatccactactataataatggcaccaatctctaatcgttgggtcaaatcaatgtctaaagggtttttagctaatataattgcttgaataattggaattggtttgctgattcctgaagcttcaataacaatttgattcaagtcagaaaattgcactaattgatctagttcaacaatcaaatcttcgcgtaatgtacaacaaatgcatccattcggcatcgaaacaagtttttctccagttcttttaaaacctttcttgtcgactaataccccatcaacatttacttcccctatgtcatttacaatgacagcaatttcctttccgtgatcaccgtacagaatatgatttagaagtatcgtttttcctgaaccaagatagccagttaagattgtaataggtatttttttcatagggaacctctttctataccttgaatttacactttaagtgcaacacataaaaatgagtcataatcgatatccaactagtataagtttgtcgagaacactcctagaaggaaaataattatgagccagtatcgtcatcttactatactcgaacgagaaagaatctttctgcttcacgaagaaggattttctattagtataattggcaacgacattcagcatagcccgtttactattttacatgaactgagaagaaacaagaaaaaaactattcaccttccaaagcggaaaaaaattatgcttatcgaagaaaaaaatgcggacgttatcacattctaaatgatccgtgagtttggtcaattgttcgtcatttatttgtcgattttcagtggtcgccagaggaaatctcgaatcgtttgaagcatgaacatatggacttttcaattagttttatcacgatctaacgtgcaatttgcaatgatcttttcgatacagaaccccttgtatattagagttagggttttaaccttccggttttgattggataaccctatgaaccatcgttattttaatttggtattaactcatttcttttgagataatatatttattggattgagaggctaagccgttccccccttgggtcattgaacccgcactcgagagactggctcctctctctgataagtggattgcgtatgagttagatgttgaaagtccttactttactccgtatctcgtacaaggtagtgacgcttttcagttgagtggatttcaatccaaaattctttttttgaaaggtcagatatacatgtactttttaggcattgatatcggtaaacgcactcacgttgcttctatcatgaacgaggaaggaaaggtattactaaaaggtttttcatttcctaacaccactgaaggagcagagtcattaattgagcgaatggtcgactattccggagcacccagtgactttgttatagggatggaagccacggggcactattggctgtccatcttttcataccttcacgaatcagattatttgattcacgttgtgaatccccttcaaacagacggatggcgtaaaggtacagaaatacggaaacgaaaaaacgatattattgattctgttttgattgctgacttaatgcgctatggctcatttgtcgaaacggtcttatccgatgaaaatgttttttctttgaaacaactttctcgttaccgaacttatttagtaggtacagcgagcgacttcaaaagaaaaattatagccgtattggatcaagtctttccagaatacgcgacgatttttaccaagcagggcgttttcggaaaagcttctaaagagttattgctggcgtttagtgccccgatcgacttagaaaacatttcctcagaaactttggcccaatacttagctgagttaagcaggaaccgaatcaaggcagaaaaagcggaccaattgaagcaagcagcttctaactcctttggagtaaaatttgctcaagaagcgttcaccttccaactacgttcaatgattgaacaattaaaattcattgaaagccaaataaaggaaacggaaagagaaatcaagcacataatggacactttaaattctgttattctcacaattcctggaattggtcctataaacggtgcgactattcttggtgagatcggagatattcaaaaattttctaacccgaaaaaactcgttgcttacgctgggatagacgcttccgtgacacaatcagggcaatatgaggcaacgcataatgttatgagtaaacgagggtctccatatttgcgaaaagccttgttttcggcggctttagtagcttctcaatgtgatcctgtttttagtgcgttttaccagaaaaaagtttccgaaggaaaacatcatctaactgccttaggtgcggtttctcgtaagctttgttacgtgattcatgctattttgactaaaaacgagccttatataattgtttctgattagctattgaacattcaaaaaaactaatggtaagaagcttatttgttgtacccttttttcggaattatctgttataaaatattttttgatttggctaatttttacttgactctatatagttagtctctcacacggcaataaaggcctgatccgttcattgcaccatcgaggaaaaacaagacatacaaaaaatcatgtcgagtctcgtggaaagatttgccttactcattcgatccatggccgtccaaaatccgcagatgatagaagtgattttggtcattggaaagccgatattgtagctggcaaaactggtggtacttgtttagtgactttgacagacagaaaatcatgcttccttttagcaggaaagaaggtccccagaaagaaagccgcttatgtgagcgagaaaatgattgaacttttaagcagtattccaaatgaggcggtcaaaacgatcactccagatagaggaaaagaattctccaatcatttcgcagttacagaagcattgaataatatgcccttttattttccagatcctcatgcccttggcaacaatgaacaaattaaaatacgaatagactcattcgagaatacttgccaaaatcgaaagagatagctacggtagataactcaacgataaatcagatgattgaaaaactgaataacagacctagaaagtgtttagattggagaacaccttatgaagtcttctttgataaagtgttgcgcttgatttgacaattcaagacataataaaaagcagatcaaatccaaataagggaaaaatgatctactctggtattatcaattaattggccaagctattatgccgttttgctaaacgtctacttcttccagtattgaccttgataaaacaacaatcaggatcccgttttaatactctatgaactgtgtcaatactaacatgtaaagttgcagcaatatcagctaatgtactcccatttaatctcatttgctttgcaaatcgataacgccgataagcatcaatattcttggaatccatagacaataatacttttcttaccatgtatttcctccaaaaattggattttaatgagccatcatttcttgagcaatttcatgtttagacaatgaagctggatagaaagtaggccaattatgcatttcattatagagtttttcttgactttctccaccaaagaaaatatggaaatgctctgccttacttggtgcaattccatgatcactaaattgaatatatttaaaacgaccagcacctgcatcatcagtttcaaaattaaaacgaacaccacggtttcctttttcataattcaaaattttgtatccaacatatttgtatgtgtattgatgatgttcaccgttgactacaaaatcaatggtgttgtctttaatgttgatagtatcaatatctgtcttatagccagtagtataataatctttgtactcggcagctgtcatgtctttattgatttttgctttgtaatcgaaaacttcatccaaaattccatcttttaacaacggataaacagattgccattcgcctgtataatcactcaattcgcgatccttcacatcggcatctttaaagtacccattagcaactgtcttttcatccttcgcttctttttctggaactacctcttcaccagcaaccatagttgttttttctaacgcttttagattgtcttccattactgaaacataatcttcaccattatccatttgttcttttgtaagactttcaagaggattcagtacttccaattttatcccagcttcgttggccaaagtttttgcaattttatcattagcattcttttcaaagtaaatataattgatcttattttttttaacatactcttttaattcagctaatcgaccagaagatggctcttcttcaggacttagtccagcaataggaacttgtttcaatccataatccaaagctaaatatccaaaggctgcgtgttgcgtcacaaaacttttttgtttcgcttctttaagactagtggtatagtcagcatccaaccgtttcagtttagtcaaatacttttcagcatttgtctcaaatacttttgcttttttcggatacaatttaactaactgatccttgatatttgaaacttccttaattgccattttgggtgaaacccacgtatgaggatctagttcatgatggtgatcttcttctccgtgatcatgatcttcttcttcactacctggcaataaaatcatgtcttttgttccttctactacattaggcccagctttcttccaactttctttagcttttggtacccatgattccatgttttcgttatgatatacaaaaacatcagcatcatgagcttttgccatatccttagctgagggctcatagtcatgaggttctgatcccgctggaaccattaaatccacgttcgcttcatcgccgatgatgtttttggtgaaatcatacattggatagaatgttgttacaatttctaattttccatctttatcattcgatacttttgcatcattagtgctggagcaagctcccaataatcctagagctgctatcccaataagtcctacactgattttcttcattctttttccttccttaattatgctaatttcttcattttatttcgtttatgttctttgataatttttaatgccctttttctagttttaatattcgggcttttaagtcgtcgatatgcactagatatatccgttttctccattagaaattacccccaatcactacttatcattatttgctttccgccagtaatttatcaaaactctgtttgatcctttcttcatccaacatttttccgattagaataatagtggtttggtctttttgtcgagtggtgtattgaaaattaacctgttcgtttacctcttgcatggcaactataaaatcctgctcttgtaaagcaatcaatcctttaaaacgatacaggctcccttggttggttaaaatcagccagtcaatccattggagtaaaaaatctttttttatgtcttgatctgaagttaagagaattgatttaaactcatgtacttgatggtgttgatgatagtatttgccattatagtgattttctgatgaatcactttcaaaaactaagggatgattaaattttttcaaattataaaaatcctttttttgaatcgtttcactatgtgtgaacattcgaatatcggataaagggttaatacttttgatttctctctgtaatttttttagtgcagataaattcaagttttgttttctagacacaaaaatgcgatctgccatgacaagttgcttaagggcttgtggttctctttcaataagttcaaaactgtcactatcaataacagtcaataaactatcgatatatactcttcctcttagttgaggcgctgttaaaagtgtttgaatgattggttggggatctgctatacctgtagtttcaatgatgatttgtgaaattggttgttgatgttcttctattgtttccagtaaagaaatcaatattgctaataaatcactgcgaagactgcaacacatacatccattatttagttgtaacacccgttcctcgctatgaactaataatttgtgatcaatcccaacttcaccaaactcattttcaattataataatttcttccctggggtagggtgagacttgcaaggcttgattgattagcgttgtttttccagcccctaaaaacccagaaacgattgtaactggtatgcccattttgtcacctttttaccacttagctatttcacttctttaaaaattgcccgtctgcgcaattttggcgaatacttttttaattctaaccgttcagggttattccgtttatttttgctggtgagatacagacgttctccagtttcgacacattccaaaataatattttgacgcataaatcttcctccttcaatacttatcgatcttcaagatatgcttgaatttgttgtgcatcttcaaaagttaactcgccagattccaattgtgaaactaaattttctttcatatcaacaggtatctcccaataaccatcgatacattgaaataactcctcgtcatactcttcaaaaattggatagattcttaaaaaatcatcaaatgataagccttggtcctcatagtaatctttgactaatccattttcaattgcctgttgggtcggtaaacccgtttcagtaataattcctctctctaccatcgaacgataaaaagtgcatttatctagcgattgctgggtcgtttcaagataatactttaatccttcttcaactaaaggtgggtaaataatttccattttgattccctcctaaaagttatatattaaactattttgaagctcctttaattactttctttccattatagtacccttttaaagatacatgatggctacgtctataatcaccattcgcttcgtcaaatgaaatttctggttttactacagtttgatgagttcttcttaaccgtttcttcgccttagatgtttttcttgctggtactgccatgatatttcctccttttaccaacttgctttttttactccaggaatcaacccttgatgggcaagttctctaaacttaatacgggacataccgaactttcgcatataccctcttggacgaccatccgtctgatcacgaagcctcagacgattcggatttgaatctcttggcaatttagcgagagcggtgcgatctcctgcggcttttaattcctgacgtttatctgcatacttttcaatcatcgccatttgtttctttgctttagcaattttcgacttttttgccatatacctttatactccttttattttgatttagacacctcaaatcgtaatcgttacgttttgacactgatactttaccaacaagagttgctcttgtcaacaataaataacatgaaataaaactcatatgaatagataactatttgaaaacgaatttatcggtacatagagataatcaaatcatttaaaagaatatgcagtttaggctctgaaaaataagaattcacttttattagtccaatcaaacacaaataccgttttaagtagcttttcctctacttaaaacggcaatatgaaagaaactataactttttattcaatcttttatgtttaactggtttatcgccaattttttaaaactttgattattccttatattataagaatagacattaagtgaactaattcaatcatactgattctttcgtgtattcaaaattagatgctgtttaataaaattattctttttgaaaaagaattataactatatcccaaaaattgtaggttaatttaaagcctatttcatcatcgtgattgagcttctttttcatagacgaatttctcagatagtttagttttctttatgagatttttgtatatttctgaccttcgatacaactcattatgagtaccttgatcaactagttttccttgatccatcactacaattttatttaccttttcaatagacttcaagcgatgcgatataattagtactgtcttatcttgtattaaacgatttaaactttcctgaatacgtttttcattttccgcatctaaactggcagtaatttcatctaaaattaaaattggcgcatttttcaaaaaagcccgtgctatggataggcgttgtcgctctcctccagaaagtgaacttccgttttctccgaccaatgtatgataaccgtcaggtagtttttcaataaagtcttcgcagttagctaaacgagctgcttttttcacttcctcatctgacgcttgactatttccaatacgtatattttccaaaatacttgtattaaacaaagttacctcttgaaaaacaatagcgattttgctaaacaaagaagctggagatacacgtttaatatcatacccatcaattaaaatacagccttcatcataatcatacagtctagacactaatttcaagatactagttttcccggaaccactagcacctactaacgcagtcacttctccttgtttagccgtaaaagagatatgatctaaaattggggtattgttatcatatgagaaagagacatctcgcaactcaatgtcaaaagatttcagaggactatctgatccctcttggatactggtttccttcatagctctaattcgctgtattttaggagctaaataaaatatttcaagcactgcttctttcatagaatcgaaggaatcctttatttttattgcggctagtaagtaaccaacgacgtagagtatagtcacttcacccgttaacagtaagtgaacacctactagaatgactactgctaaactaacatatgagaaaatagaggataaggccatgactgaaaaagtacttaattctacctttaaatgaatcctttcactctcttccatttttttgaaaagtctgtcttgaacttttttagatagattaaagctattaatctcttgctgcaattcaatagtttcttgaaattcttccgagttttctctcaaagtatcgtaatatttagtattggctttcgtttgggatttctttgataacaagattaagacaaaactaaataacgttggcaaaataacagctaatcccattgtgacattaccaaccaaaagcatcactgaaataaaagggaaaaacagagccataccgccggctttaggtattgcatgactcatcgcatgctcaataccttcaacgtcagacatgatagtttgagataaatctgataaattatgttttgaaaaataggataatggtaaatttgacaaatcgtctgcaatttgcactcttaaatgcgcactttctttataagtactattatataagttttcatactccctatctaacaaccaatacatgaaaagcaaagtaacaaacgatactgcaaaataaagccaacggggctttgcattttctaaaactaattcgtctatcagcatcattataatgaatgctggtaccatattaatgcagtatacaaaaaaactagaaatagaagctttagttaaagcttctgcgccctgatcagttaaagcaaatttttttttataaaaatttttcattgtcaagcctccaatcatttgcattctcataattagtgaccaattgtttatacactcgatgtttagccattaattcattatgatttccacgttctactatttttccttctgacaagacaagaatttcatctacagatttaatgctggataatcgatgagctatcataataactgttttttctttcatcaaatattgaaaagccttttgtagttcatactcattatctggatcaatagatgcactggcttcatccataataacaatctttgcatcttttaaaattgctctggcaatagctatacgttgtttttctcctcctgacagataaactcctttactaccaattaaggtatgctctctttcgggaaatttttctaaaatcgattcgcaaccggctaatcttagcgcgtcaaatactttacttgctggcgcttgaggatttgctatagaaacgttatcgtaaatactctgattgaatagtttcgtatcttgaaagacaaaagcaattgtgttaataattgtgtcttttgaatagtgatttaaaggcttaccaccaattttaatctgtcccttatccacattgtagaaacctgaaattagtttagctatcgtactctttccgcttcctgattttcctactaatgcataaattcttttttgttctaaaactaagttgaaattttctaaaacacactcttctttgtatgaaaagctgacattttcaaatgcaatgtcacaatttttaatctgtgtctcgttcccatattttagttggtcttgcttcatttctaaataaagggagtctagtgtttcgactgcatatcttgcttcaaacaagtgcatacttacatacattattctcatgaaagaaacaaaaataattccacttaaaaaaaacaacatcaacaagtcaacagctaatatcttgggagtggtaagagaagttataaaaaaggttataggaactatcaaaatgcaaactatgccaaaaaatagccattgaaaaagaacaaaaggtgttttcccactcaaagaatacttatatgcaaacttagcataatcgttaattgctttattcaaggctttaaatgatgttactttagcaccaaatatctttataacttgaattccgcggatatattctaccgtttcagagcttaacacatctaacgattcttgatatttttgaataaaatttgtattctctgtcattttctttaacaagaatacaccaattactaacatggcgattagaaccaatccaattttaaagttaatgaaaaagcctaaggcaactgataaaacaggtgttactatggcttgagcactatctggaatcaagtgagcaattgccatatgtgttttagccgcgttgtcatcaattgtctttcgaatatatcccgaagaatttaaatcaaaaaaacgaaaacttgcttctgttaaaccgctaattcccttttttctcaaattagtctctaagcgaaacccaaggatatgagaaaataagccagaaaaaatataaaataaagctcctaaagttaaccaagcaacagtttgaaccgcataactcttagctaaatattcatctcctacaataattagagactgaagaaatttgtaaatactgtaatatccatagactgttaatacgacagaaaaatcagaaaataaagtggctaaccatccgtagtatttcattttagggacataactaaataattttttgtatactttcattttttcctcccccgcattcaatttcttctcttattcgtttacaactgttaatgctttccgtaatagcgtaaattagagatgtacaaacagatagaaggtaaactacgttctattttttgtatttttttaagacttttcttccaatcaatacaccaatcatagataaacttgctacaactaacactgaaataattccccatatacccaccgcgtagtggatcattgcatccattgttgcagcagattgtcctctatctatccagtcttgacgaaaacgatctgtaaagaaccatatgggaatccactgtccggcagcactgcctagttgcattagaacccaagacacaacttgaggaattgctcgatcatatccaaatacagatagaataatatcagctaagatcgccatactaatcgaactgataaaccaaggtaagtacgccccgcccattaacgtaaaaaataacaataaaacaattgtgtaaatagtaaaaattccttttctagggtagttatagctaatataaacaaatatgattccagataataatccaaaaatccctggggatatgctgtgaccaaacgccccaccaatactactaaccattattgaaaaaaagtaaattactagggaaataactgtagctaaaccaataaaaatataatcttttgttttcatatatattctcctcaattctatttcgttatgtcattaaaaatctgttctatcaaagttgaatcttctactctaagttttatatctttttttattccaccattttttaaataaataattctattgcatgttttataaagaaattccggatcatgagtggctataactactgcacccttttcttttaagtctttaataaggtcagcaatcctttccatattgatataatccaacccacttgtaggttcatcaaatagaaataaattagtttttgacaatgaagctatagaaaccaataatctttgtttttctccaccggataaatcaaacggtaattgatctttcattttataaagttccattttttttaaaattttttcttgctgatctttactaactatttcattccccagggctaactcgctcctcactgattctgtgaaaaattggtaatccatttcttgcattactaaaaacggcgatgacaaattttttttattttcgattatctttcctttggtagggcgaataatcttcatgagtattcttagtaaggttgttttccccacaccgtttttccctaccaaaccaataacatctccaactttgacatcaaaatttatgtcttttagaatattttcataagtaatttcttcaacttttaatacatctgcacttaccttttcgatatagggaacttcaatcgaactattaaaaatgtcaaatttccttaatgcgttattgttttcagtttttaacaactgaatagttgtagtttttacagttctatttttaacaaatagaacttgatcaattaattctttcaaatagtaaaaacgatgttcagctataacaatagtaaatcctttattttttaaatcacaaagtaagtcagcaagtttcttagtcgctttgaagtccaaatttgaagacggttcatccaatataattaatttagagtttagcgataaactacatccaatagaaattttctgccgttcaccacttgatagcgaaaaaatgtttttatctaatatatttgaaagatctaataattcagctaattcattgattcttttatccatatgctcttttgtaaatccaaagttttccatcgaaaatactaactcactcgttgtatttgttgtaaagaattgtcctctaggatcttgacttacgtagccaatattttttgatatactttcttgtgttaaggattgtagcgagttattttcaaataaaatttccccaaccaattttccgtcataaagtcttggaataagtccattcattaactttaatagtgtggatttcccactcccagaagaaccagtaatcaatgtaagactgcctttttttattgaaaaattaaggtcaacaagcgcttgttccttaacatccttatatgaaaaagaaacattgttaaattcaaacaattctttcacctcaaatcaaaatacttaagaaaaaaatagtaacggaaaacaggatgatatagtctaataagctcatgtttgttttatagtaagaacttcttttcacaggagattctatcccctttgttattgcattagcggtcatttcttcagcaatcatagttgcacgtataagaacgggaactaacagaaattccaaatattgcagaggctgaaaaaaagacaagcgaatgtttctcatttttaaagattctttaatcattcttatttcagaacgataagtcggaaagaatctgatcactactgtaatacttaacattatttttttcggtaaatgtattttttctaaagaggataataattcattgctagtatagacactaaccaacaaccatgagatcattacgaccggcaacattcgaaatacaatatataaggatgtcccaaaaaatatagtaaaaaactctatcttgatagcatcaataattttcattactaaaaacagaactgaataaatcaagatgaaataaatacatgtctttattttacgaaacatcaatactaaaactgtagcaataatgaaacaccccacttgaaatatatttccctttcctaaaaaaataatgaccggaaaaaaaatatttaaagtaatcaaggttaacggattgatttttgacactctttcacctccaaaaaataagatcgcactgttatcttaagctgacaaaaatgcaccgttattcagataacagtgcgatcttatcaaaaagcataactgagaacaattctcaatgcaagcttttttttaattaactcagtaattcaatccacccaggaacagaaaattgatacaatcttctggttaatagcatagtcttttcttttgaatagctatgcttcaatatatcatagaatgtagcgtagaatgagtaaatgtagaagtggatttcttcttcattaaagactaaattttgattgatcattccgatagtctttaacttatctagacaacagactgtcttttttgtcacaaatgatgtaattttttcaacaatatcttgatatttggttccagctgattggaataaaaccaaatcgaatatacgtttattctcaaaaatataattaataaatggatctaattcattgaagttctctctccaacttttctctatatctatattttctaagtttaagaggtatttggtaaactcttcattatacatattaataagcgcattaatatgcggctgaataatttcttcaaataacgcttccttagaagtaaaatgtttataaaaagcacccgtagttacgcctgcggtcaagcacagttgccttatcttagtttgctgaaatccttctttttcaaaatggcttagtccactttctattaatttttggtgagttgtaatataatctctggtttctatgggtacttcctcctaataagatgaattaactatattatcttacacaggacttgaagtttcaatcgttaacgtctattactgaactcattccttagagctaaactaatgagaaagagcaaaataactgatacaaaaagcaatcctacaagaattaatagactcatctaaatcattcaccttttctaaaataatccgagaaagatttaaaaaaattatatccagctattagggtaagtcctatcataatcactccaatagccattttcttatcctccctaaaaataaagtcttttacttaaaaccttttttgtaatcgtcaataaattttttccctttatcagttaattgaaatcctatatctaaatagtcctcatatctaagtttagccagcatctcacttacagatgctggactaacacttagaacttttgctaaatcattattttttaatttcttttttctttttgataattcctgaattgctagtaaataaattagtatagtagtcgttttaatttgtaccatacctaccctccaaattatttcgaaaggccttcagcaattttatccaggttccatttcatcatcgcatagtaactatcaccatcttgtcctttttctgcaattgaatcagtaaaaatcgttgaatagataggaatattggtatcttttgatactgttttcattggtctatcgtccacactgctttctacgaataaggagggaacttttgttgtgcgtaatttttcaactaagtgttttatttgatctggtgttccttcttcttcagtgttgatttcccaaatgtaagcagaaggcacattatacgctttcgagaaatatttaaagcatccttcacttgtaacaatcatttttttatcattcggaattgaagcaaatttagatttagcttctttgtctagagaatccaatttttcaatatacttatctagattttctttatagaattttttattatcaggatctttttccgctaactgtttttcaatatttttagcgtaaataataccgttttctaaatttaaccaagcatggggatcttccttccctttctcactctgaccctctaagtaaataacatctatgccatcacttgctgcaaaatagtctttgttttcctctttgttcgcattttttactaattttgtaaaccaagcatttcctccagtttccaagttaacaccgttataaaaaatcaaatctgcttttgaagttttttgaacatcttcaggcaaaggttcatattcgtggggatctttcccaataggtacgatactgtgtaaatcaattttatcttttgctatattttcagtaatatctgctaaaatcgaattagtaactactacctttaatttttcgttcgaagccactgtatctttgtctttactatttgttgaacatgccccgaatataaaaagagcaatcaaaatccccagacttcccagtactgctttccattttctcatcataactttctctccttctttcttaaaaatttttgttttggtgagattagaaaactaattacaaataagaatgccgctgttaaaacaatacttgatcctgctgctatgttaaaactataaccaatgaacaaacctagcaatgatgagcacgctccgactgtcgccgaaataaatatcatagtttttaagctgtttgcatataaatatgctgtagcagctggtgtaattaacattgcaacaattaatatagttcccacactttgcatagctgttactgctactaaagttaatagaatcattaatagataatgataaaaactgacattcatccccattgcttttgccattaatggatcaaaagaagtgattaataattctttaaaaaatagaacaactgtaaccaacactaaaacagaaacgccaattgtaatccacttatcaatatcttgtacagctaaaatatttccaaataagatatgaaataaatccgttgagctatttgcaactcctataaggataactcctaatgctaaaaaagaactgaaagtaataccaattgctgtatctccttttattacactattgctttttataaaagtaataatgatagaagctaatagaccaaatacaatcgcaccaataaaaaaattaatacctaaaatataagaaattgctactcctggcaaaacagcatgagaaatagcatcacccataagagacattcctcttaaaataataaaacaacctactgttccagaaacaatccctataactacagatgtaattagagcattctgtaaaaagtgaaagtcatacagaccattaataaaattttgaagcatattattccctcttgtatattagagttagggttttaaccttccggttttgattggataaccctatgaaccatcgttattttaatttggtattaactcatttcttttgagataatatatttattggattgagaggctaagccgttccccccttgggtcattgaacccgcactcgagagactggctcctctctctgataagtggattgcgtatgagttagatgttgaaagtccttactttactccgtatctcgtacaaggtagtgacgcttttcagttgagtggatttcaatccaaaattctttttttgaaaggtcagatatacatgtactttttaggcattgatatcggtaaacgcactcacgttgcttctatcatgaacgaggaaggaaaggtattactaaaaggtttttcatttcctaacaccactgaaggagcagagtcattaattgagcgaatggtcgactattccggagcacccagtgactttgttatagggatggaagccacggggcactattggctgtccatcttttcataccttcacgaatcagattatttgattcacgttgtgaatccccttcaaacagacggatggcgtaaaggtacagaaatacggaaacgaaaaaacgatattattgattctgttttgattgctgacttaatgcgctatggctcatttgtcgaaacggtcttatccgatgaaaatgttttttctttgaaacaactttctcgttaccgaacttatttagtaggtacagcgagcgacttcaaaagaaaaattatagccgtattggatcaagtctttccagaatacgcgacgatttttaccaagcagggcgttttcggaaaagcttctaaagagttattgctggcgtttagtgccccgatcgacttagaaaacatttcctcagaaactttggcccaatacttagctgagttaagcaggaaccgaatcaaggcagaaaaagcggaccaattgaagcaagcagcttctaactcctttggagtaaaatttgctcaagaagcgttcaccttccaactacgttcaatgattgaacaattaaaattcattgaaagccaaataaaggaaacggaaagagaaatcaagcacataatggacactttaaattctgttattctcacaattcctggaattggtcctataaacggtgcgactattcttggtgagatcggagatattcaaaaattttctaacccgaaaaaactcgttgcttacgctgggatagacgcttccgtgacacaatcagggcaatatgaggcaacgcataatgttatgagtaaacgagggtctccatatttgcgaaaagccttgttttcggcggctttagtagcttctcaatgtgatcctgtttttagtgcgttttaccagaaaaaagtttccgaaggaaaacatcatctaactgccttaggtgcggtttctcgtaagctttgttacgtgattcatgctattttgactaaaaacgagccttatataattgtttctgattagctattgaacattcaaaaaaactaatggtaagaagcttatttgttgtacccttttttcggaattatctgttataaaatattttttgatttggctaatttttacttgactctatatagttagtctctccaataaatatagtatctccataggctttttttaaattctcttcattaaatacagattctacacttccgtgagcaattagatttcgattcaaaagaataatattatcaaaatacttctttaccttgcttaaatcatgatgcacaattagcactgtttttccctgatgtttcaattcttttaacgtatccataattattcgttcactaactaagtctatccctacaaatggttcatctaaaaatatgaaatccgcattttgagcaagacatcttgctaaaagtacacgttgaaattgtcctccagataattctcctatttgatgattagaatattttcccatatcgaccttttccaaagcctttgaaactctttgccattctgcatttttaattctttgaaaaactttcattccggcatatgttcccatagatacacattcttttacttttattggaaaagtaaaatcaatatcagctttttgctctacatatgcaatcttcaccagttttttattgatatcttcattattaatggagacctctccctgatgagggataatatttaacattgctttaagcaatgtagattttccagcaccatttggaccaataatacctgttaaagcaccttcttgtatttttaaagaaatctcgttcaatgctaaaaaatcgttataacaaacattaagctttttcacttctaacataactttctccttctaaatgataatgattatcacgatcatatggtatacaaaaattatattttagtcaaccctaaattttataatttagatttttttctgttgctgaagattagaatgacaaaactatttgaaactacgcgtatagtaagtagctttcaaaatatataaaaaaggagcgttctcaaatgagaacatgctcctaaaactactttattggcgtatggaaaaattatacttaaagtggatagcgggttgaataagttgataagcatcaaaacatttataaaaattattcaagactatgtctgttccatatacaaatatgaaaatcagtaaactccatttaacttttttcgtagtgtgtctttttatacatgtttatcgttattaatagtgaataggaaaaaacctatttttgatcattgacaattaaatacaatttttgaataacgatccctgctattcgagctagaaactcaagtacgccatgacctgattagcgacaaatacttagagatttctttttgttctgggaaaacaaaatgccatgacaatagcagcaaataatgatacttccgtaaggctcgccgtaaactggggagaggtgaaattcctatgtgcttacccaaagcaattcaaaaattctaatcttttttaggagatgattttataaaattgagagtctacttgaataaaaaacaaacctgtgagtttctaggaattgataataatactttagataagtggattcgtatatataattttccagtaatcagaattgacggtatagttcgctttgacatagaggatatcaaagattttatgaatacatttaaaacaatttgaaaatttcttctcgccgcatatactaagaatagcgaaatatactgccttactttttaagggagtgaggaattttgcctacaaaactttcaaatgggaaatataaaactaatctgaggtatccaaaaaaattcagagaaatcactggaattacatcagaaaagtatcaaaaagtatttccaactaggcaattggctattaaagccgaaaatgcaatgaaaaggaaaattgaaacagttttaagagaggagaatgcaaattcactagaattaaaaggaaaaataaaatttaaggaattctatgaatcaaaatggcttcctagatatgaactaggtcagactactagatcaaaaagagctccaagttacgtaacaattagtaatactaaagatatattccgattgcacatccttccaatgtttggtgagtatgcaatgaactatctaaattcaaatactgagataatatcagatgaattaacaaaaaaatcgaaagaatacgcaaatataaaaattatcaaaggatatgtccgttctatgtttgatattgcagaaatactaaattatattgaatttaaccgaactaccaaaattattcaatgtatcactgcacctaaaaaaattgctttagaagaaagaaggatacgggaaggtaatcaagcattatcgtcagaagagcttattgcttggatagaagcagtaaacactgacttgaataatcacttgcttactcttcatgactatactcttttcatgcttaccctatatcttggtgatagaaaaagtgagacgtatgctttgcaatggaaatatatcgactttgagaaacaaacggttcgccttaaacatgctttggataaatatcaaaaaaagaaatttacaaaaggtcgaaaggataccgtaattcaagtacccgaaattgtaatggcattactaagcaaatggaaatcagtgcaagctgagcaattgttgagattaaaaattaatcaaacaccagatcagtatctctttacctatactaaaccatccggagaagtaaattgccctgttcacgctgattacctaaactatcgaatcaattcaattaaaagacgacatcctgaattggctcatttatctccacataagcttcgtcatacctatgcaactatagctagacaaggcggagcaaatatgaatcaaatatctaatgctttaacacactcagatatttctactacaaagatatacgtaaacacaccagatgtagttgataagactgttttcgaagcatttcaaaaaggattaaagaactaggatgaatgtgttctcgaatgtgttcttaaactaaaaaaagacactttccaaataattgaaaagtgtcttgaaacattgatatacaaagaatattaacgttttgagaattgtgaagctttacgtgctttcttaagacctggttttttacgttcaaccatacgtgaatcacgagtaagtaatccagcgcgttttaatggtgcacggaaatcaggatctacttctaataaagcgcgtgagataccgtgacggatagcgccggcttgacctgcgtagcccccaccgtttacgtttacgaatacatcatatgaaccagctgtttcagtaacaccaaatggttggttgattactaaacgtaggtcagcgtgtgggatatattcttcaacgtcttttttatttacagtaattttaccagttcctggtactaaacgtacgcgagcaactgcatttttacgacggcctgtgccgctatattgaacttgtgccaatgaatttccctcctattaaattaagtttgtgatgtctaagacttctggttgttgtgctgcatgtggatgttctgctccaccgtaaacgtgaagtttcatgccttgagcgcgacctaaagtgtttttaggaagcatacctttaacagaagtttcgaccaaacggcgagaatttttagcacgcatttcgcctgctgagattgatttcaatccaccagggaagtttgagtgacggtagtaaatcttgtcagttgctttcttacctgtcaatttaactttatctgcattaattacaattacaaaatcaccagtgtcaatgtgtggtgtgaatgttggtttattttttccgcgtagcattgatgcaacaactgttgaaagacgtcctaaaggaacatcagttgcgtctactacgtaccatttgcgatctacttcgcctggcttagccatatatgttgtacgcacgtttttttcctccaatttcgatttcgaatgtttgacaaacacttgagtttccggggctctcgtggggcaaacaataccatttaccataatacttgcaaagccttgccatgtcaatgtttttctctttgaaaacgcaaaatattttcattttctctaacttcttctactattcactatcctttcttttatacaggtcaaaatgaataaagaaacgtattttcaaaaatattttgcataaatatttaaaaagtgcttgctttttgtattttacgatgctaatatgacttcaacacattaattagaatttaatgaaaaagcgataagggagcaatcaggatgaaagaaaaagtgattttagcatactcaggtggtttagatacttcggtttcaatcaaatggctcgtcgacgaaggctacgacgtgattgcctgctgtttggacattggcgaaggtcgcgacaccgaatttattaaaaataaagcattgcaggttggggcaacagaatcctatgcaattgatgcccgcgaggagttctcgcaagattttgttttagtcgcattgcaaggcaatacatactacgaaaattcttacccgctagtttctgctttgtctcgtccgttgatttcaaagaaattagttgaattggctcaccaaacaggcgcaacgacaattgctcacggatgtactggtaaaggaaatgaccaagtccgttttgaagtttccatcgccgctcttgatccgaacttgaagatcattgcaccggtccgtgaatggaaatggtcccgggaagaagaaatcaactatgcagctgaaaaaggagtaccgattccagcggatttggataatccttactcaattgaccaaaatttatggggacgtgcctgcgaatgcggcattctagaagatccttgggcaactccgccagcgggtgcctatgcgattactgctgaactagaagatacaccagataagccaacgatccttgagatcacgtttgaaaaaggggtaccaactgcattagatggagaagaattatcattagctaaattgatcatgaagctaaataccatcgcaggtgtacatggcattggcagaatcgaccatattgaaaatcgtctggtcggcatcaaatctcgggaagtttacgaatgcccaggtgcagaagtattaatgaaggcacataaagaattagaagatttagtatttgttcgcgagatggctcatttcaaaccagtcattgaacaacaactatgtcaaatgatctacgatggtctgtggttcaatccaacgatggatgccttgatcgcattcttgaagcaatcacaagaagtcgtgaacggcgtactccgtgtgaaattattcaaaggcaatgtgatcgttgaaggacgtaaatctgacaacagcttatacaacgaaaatttggcgacttatacatctgccgatacgttcgaccaagaagcagcaatcggcttcataaaactatggggcttgccaaccaaggtaaacgctgaggtccaagctggaaacaagcagaccactgtacaataagaaaaatttgaaatcatgaaagtgcaagagaaactagatgtgaggcggcttttacttgccggtaaataaggccgtccggtttcacatcttgccattgctcataggagagtttcttttccggtcaggaaataaggaaaccagcaatgttttcatcctgaggtatctgaaaagatgcctcctccctaaaagaaaagcgcgagttatgcgctgaaaaaagaccgttgcgacggtcttttttgttaaaaattcatagacaaaagcgaggataaaacaatggcaaaattatggggcggacgttttgatggaaaaaacgaagcgtggatcgacgcttttggtgcttcgattccctttgatcagcaattagcaacacaagatattaccggcagcttagcacatgtcaaaatgctcggcgaaacgggcatcatcacaaaagaagaagcgcagcaaatcactacgggtctcaatatattagcagaaaaagccgcaaaggatgaactgacctttacgattgaaaatgaagacattcatttgaacttggaaaaaatgcttcatgacgagattggacctgtcgctggaaaactccacactgctcgcagccgaaacgatcaggttgcgacagatatgcatttatatttgaaggaacatctaactgagattattgagaaagtccaccatttcagagcggtcttagttaataaagctgaagagcatgtcgaaacaatcatgcccggctacactcacctgcaacatgctcagccgatttcttttgggcatcacttaatggcctattatggcatgctgacacgtgatcaggcacgtttggaggaaagtatgaagcgcgtggatatctcgccgttaggctgtgcagctttagctggtacgacatttccaattgatcgtcagatgaccgcagatgagctaggcttcagcgacctatacatgaatagccttgatggcgtcagtgatcgtgacttcattttagaatttttaagcaatagttcgattttaatgatgcacctttcacgtttttgtgaggaaatcatattatggtgcagccatgaatttaaatttgtcgaactgaccgataccttttcaacgggcagctccatcatgcctcaaaagaaaaatcccgatatggcggaattaatccgcggcaaatcaggacgagtatttggtgatttaattggcttgctcaccgtaattaagggcttaccgctggcttataacaaagacctgcaagaagataaagaaggcatgtttgacacggtccacaccgtagcgacaagcttagatatcatggccgggatgattgatacaatgaccgttaacacccagatcatgcacgatgcgacggaaaaagatttttcaaatgcgacagaattagctgattatttagccacaaaaggcattcctttccgccaagcacacgaaattgttggaaaacttgtattagagtgtacgcaaaaaggaatctacctgcaagacgtctcattagaagaatatcaagccatcaatccggtgatcgaagaagacatctatgatacgctagcttcaaaaacagcaattactcgccgccattcattaggcggaactggtttcgaccaagtcaaaaagcaaatcgaactagctaaaacagccttataaagtgtcaaaaggactatccgcaatggacagtccttttgcttatgcctttgtataaaccgaggttgcagtttcttttaaaacctcatttaattctatgatattttgtttcccttgttcagataaccaagcaattgccttttcttcgctctctttcacaaatggttcgacgccattcgcccaggttgctctgccgcataatacgccattaaaggttgaacctgactgcttcgcaaaacgtaacgtttcctgaaacaactcggcactaacaccagcgctcaagaaaatgaatggcaactcggttgcatcagattgttctttaaaatacgccgctgcttctgcttgtgtatagcagactgtttcgccaaacccttcaacaaaattcatatttaccggcacttccactttcaacacatcaacctgataacgttcctgtgaaaattcctgcatcgcgccaatcaccttacgtggttttacttgagcatactcctgggaagtcgcgtctgcgatctctgcatcataagaaacaatctccaagaaaaatggaataccttctgctgtacattctgagccgattcgttccatgtacgcacgtttttgttcattgatctcttctggttcatccacgtcataatagagtaagaacttacaagcatctgccccagcctctttcaaacgtctcactgaccaaacattcaatacatcaggcaagcgccccggtgttgtcgcatcgtagccagttttttcataagccagaagcaaaccgcattcggcgtcgcgcacctctgctgctggcaacccgtattccggatccaataagatcgctgaagcataaggcgtgagctgttgagaaaccaactctttgaatttgattacatcatccgttgtcgcttccttatagttaccgatcattttcttcaaagcgccccgctgatcaatcgccaaagccccgataacaccattctcattcgttagctgatcgagatattttttctttcctgcactgattgtcttcattcattttcacctattttttcatttagtagtgtcgcaatttccgcttttgattgcgcagcttttagtttttcagtcacttcattgcgcatcaataatcgtgcaaccgcggataataatttcaagtgtgtggtccctgcttctgtgtctggaataaatagcgcaataataaagtcgatcaattgtccatctaaactattccattcaattcctttatttaaggtaacaatgagaatgcttggctcgctgatcgattgatctttcgcatgtggaatggcaaagccgtccatcattccggtagtaccttcgttctctctttccaccagtctttgataaacgtgcttctcatctgctgagatccccgtctctaccgcttgcttggctaaaaattcaaagacttctttttgtgtcgtcaaagtctgatctaaaaatattttctcttcttgaatgattcccattacgtactcctttacttggccactgctgatttttctacctgttctgccgcttgcttttctttttttgctacactgctcttttgaatcaggcctaagatcacaccgccgacaagcgcaccaatcaaaatcgaagcgacccactgaattttccctgtaacaactggcaacactaagaatccaccatgaggtgcaggcacttgaacaccaaacatataggtaagaacagcggcaatcgaagaacctagcatcatcgtaggtaatacacgaatcggatcttttgcggcaaaaggaattgccccttcggtaatatgtgtagaacctaagataaagttaactaatccggcattacgatcatttgtatcaaaatattttccaaagaataatgtcgcgaagcctgtaatcaacggtggcgcgatacaagctgctgacacaccagccatgaaagtcgtattgccttgcgctaataacgccgttcccgtaacatacgctgctttattgaccggtcctcccatatcaaaggcacacatacagccgacgatcacaccaagaattaacggattagaattttcaaagccggctaagaagctcatcataccttcattgacagccttcatcggatcagctaatagcgacatgataataccaattactgcaactccgatcactggatataagaagattgcttttaagccatccagttgttttggtaagcctgccatcactttttgcagaagtaagatcaagtaacccgcaagaaaacctgccagaattccgcctaggaacccggtccctccattagttgcgacaattccaccgacaaaaccgactactaaccccggtcgtttagcgattccttccgcgatataagcagctaaaacaggaaccatcattcccattgctgcatcaccgacactttttagcatcgcggccgtcgcattatattgtgcattctctggatcgaaggaataaattccccaaacagcaaatgagattgcgatcaaaacaccgcctgccactacgaaaggaagcatgtgggaaacaccattcatcaaatttttataaatgctgcgaccgaaacttgtgttagatcccgtctcttcttctaaagcgtccactgcttgattttctgctgctactgagccttttccagccaaagcgtcatcaattaaacgttccgcatctttgattccggtactaaccgacacatcaataattcgtttcccggcaaatcgttctggatgaacatctttgtctgccgcgataataacggcttctgcatgcttgatttcttcagcagtcagttcattttcaatcccaatctgaccatgggtttcgactttgatggtcacgccttttttcttagccgcttgttccaatgcttcttgcgccatatacgtgtgagcaatacctgtcggacaacctgttgctgcgattaattgataatttcccatgtttttaacccctcttctttgacttcaatttgtttacttagttcttttacatccgaaaaatcagtcagccccttgcgaaatgcagtagaacttcctgcggctaaacttttgcgtaacgtctcttccagcggctgctccgttaaataaccagccaaaaaggttcctaataatgtatctccggcacaagctgtgttgactacttttcctattggcgaattcccacgaataatcttagtctgactgaaaaaaattgctcctccactgccaagtgatagcagcacattttgcgctcctgcttttatcaattgctgtccataaaataaataggcttcttctgaatcaataatttcgccaaaccatgaagctagctcctcttcgtttggcttcagtagaaaggggtggtagggcaaacagtccatgatctccttgtagctgctatcaatgatcagatgaacatcacgttcttgacaaatccgactaatatcgactaatattgtcgattcaatccccctcggcaaacttcccgagatacagagataatcttcagcctgcaagtttctaatttgatccaaaaaaacttcaaccttttcctgcggtatttctggaccttgattgactaatttgtattcctcctttgtttgattgacttgagtaaacacattgatccgtgtcatcccaggaacttcaataaaatcagtgctgatctccttttcctgtaaataatcttctatataattcccagtaaacccagcacgaaaacctagtgcggtcgtatcaactcccagcatttttaggatcagtgaaacgttgactccttttccatttgcttggatatcatcatcctttgttcggtttacagtaaaaggctccatagtatctgtttcaataaatagatcgattgctaaattcaaggtacaagtgtaaatggacataagtgacgacctccttgatcttattatgaggcagtcatagacgaaaaggttttcatattctaagctaatgactgaaaagctttacatcttttaattactcgtgatacctttaactcgtgataattgaaagaaggttaatgaagcaatggatcataaattgagcgaaacagaacaatacctttgggattacattgaaagtcacattctcgatattcccaactactcgatcgtcaaacttagtgaacaggccaatgtttctacggctacgattgttcgcacaatgaaaaagaaaggctatgaaggattcactgcctttaaacatcatctaaaggaacaagaaaataaaaatatcaatttctcttcattagataaagtcgataaagggattcgacgagctattctaaagaatgaacaggaagtcgtccgaaccatcaatatgatagaaattggcaatattgaagatgccatccaaaaaatcaaattcgcggaacgagtaatcatctttgctcgaggattctcagagatgatcggacaggaaatgatggtgaagtttcaattgacggggaagaattgtcaaatgcataacgacccagagatcatcaaaaatatcagtcgaaaactaaccaagcgagatattgtcattttcatttcattaaatggagagacaaaagaactcgtcgtcgccgccaaaaattgttacgagttcgaaatcggttcaattttattaaccgccaacaatgcctccagtctaatgaactattgcgagattgctttggtcggcttcaagtctgaaggatcttattttcctgattatgaagttcgatcaaggctccccttacaaatcatcgcgagaattttattggattcctatgctttacgagttgcggatagttaatatgcaacaacatatgttcaaataaaatgaattaatttagtaaaaagaatttaagcaacagaaaaggcacacatcattaatgatgtgtgccttttctgaacgaattaagcatcgatttctggtgcttttcctaaatgagcttggatcatccaaatgcgtttttcagtggctgttttgaattcgatgaagatatcttgtgttggatcatcgccttcttcgccagtaacgtcaatccctttttgataaagatcagccaagtaacgatagttcttaacaagaattgctaaccgttcttccatcgtacgatcccagcgtcctacttcatcagaaatttttgtattatctgccatttcgcgtaatgttgaataaggtgagccatctaatgtaatcaagcgttctgagatctcatccaattgatcatttacatcatccataaaatcatccatcattgggtgcaatgtcaagaagccagggccgcgcatataccaatgagtttggtgaatgaccatagacatttgacttaaatcggcaactaattggttcaatacttctttggttttctcaaatttcattcctttgtacctcctaatttttactctaataaaagcataatacaattatgataaaagtacaaagaaaatgctggtaaagtgcttttttttcgtatcttattgaaaaaggaggtgagaacaatcgtaaatttcatttttggtacaattattggctcatttttagctgtcgtttgtgttcgcattccttgaaatgagtctttgatttatccgccttcacattgtgatcattgcggtcacccgcttcgagcgattgaactgattccgctactctcagctttgaagcaaagattccattgtactcactgtcagcaaagattctctgcgcgaagtttttggttagaattattttgcgggattctctttgtaatttttttacaggatttagattggaaaagcctatggcaagtattctggttattgagctcccttgttttagccgtaatcgactgggatcatatgattgtcgagatgagaatttttgggggaacgggagtgattttattaattagcggagcggttctatttcatccgcattggttccaaccattaattgtttgcggagtatttttcttcagtcaaaaaatactcccagacagtttaggtctgggagatctttgggtaattggattatggagtttctttttatcttggtatgaattgttacaggtcctatttatcgcttcactcagtggtttgatttttttcggttatcagaccttgcgtaaaaagattcctgaacagctgccgtttttacccttcttatttatcggccttctattattcctgctaaaaaaccgttaagcgttccaatgattacggataaagcccttacgtcccgaaccttcactgtaagcatcgtagtgttcgggattttttcgataaaaatcctgatgatacgcttcagcaggataaaaggcttgagccggttcaatcgatgttacgattggttctttgaaacgaccgctggcttgtagtcgttccttcgaagcttccgccacttctttttgttctggagtagcataataaattaccggccgataggaatctccccgatccgcaaattgaccaaaggcatctgtaggatcggtttgctgccaatagatttctaccagctgctgataagaaatcaccgctggatcaaatgtaatttctacggcttccgtatggcctgtcgtaccactgcaaacttcttcataggttggatttggtacatgtccgcctgtgtaaccggaaataacttgcttgataccaggcatctggtcaaatggtttcaccatacaccaaaaacagcctccagcaaaaattgctttttcttctgccataaaatatgcctccttttgatctcatcataaccctttttagaaaaattgaaatgaatctgctcagacactcgtaaaaaaaagagaatgtcccagattattgagtcattcccataaatagtatttcgcttttttaataattatccgtatcaatcggataaattatttttccgtaaccagtataatcataatgcgttccagcactaattttatccacactgctgtcatcaaagaataattgattgtcgtcatctttatcaaggttcggtaattttttctttgtaggcaatccgagctgcttcttcacgatattttgttcctctaacagattattcaatcccaaaatttggaaataaatatcactgatcatctcgccctggccttctagctgtgtctgttggatgttctttgcagcaggtgtgtaatctgttgcgatcgtcagcatctcactccagctcaaatcggtctttacataatcttccactgcacgcaaatattttttatactttgtgacagagtcaacagaaagaattttatgaatgatcttagataaaatttctcgttgccttgcctgtctgcccacgtcaccttttgggtcctcgtggcgcatccgcacatattctaatgcgtgtctgccatctagaacctgctttccctttttgacatgcacaccgtccaaagtaaaatcaatcttgttgtcgacctcaattccgccaaccgcatcaactaatgtttttagccccttcatattgatctcaacataataatcaacaggaacatctagcatttcttgaacactttcgatcgccatcttagtaccacctagtgaataggccgcattcaatttatcataataggtatcgcccttcgcgacataattattcttgtcacctttatacccaacaatctgagtataaatatcgcgatccaaacttgtcattagcgtttgttttttcttaggattaatagtaactaacatcatggaatccgagcgtccttgatagttccgccctttatcacctgtatctgttcccattagtaaaatagagaatggttccccgctttttaaatcgaccttatccgaacgtgtacttttataattgacttttttagtcattttattgattgcttgatcaacatcattattcacttttaataaatagacagtcgccgttccaacaagtagcacgatgattcccacgacaatcaagataattttctttgctctgctcatatggcacctcagaaattttatatccctatattttttgtcattctctcataaaatgacttttggcaatagtctttatacagcgctctaaacgaaatttaacatctgttcaacgtgagcctgcttatttgccagatacctttttataatagcctgaaaataaaaagaccacaagattctttttcagaatcttgtggtcttttaaagccagaattttctagcctaatggattattcaaagcgtcttcagctgccatttgcgcttcaatatcagagatactgtagacattttcgctagctacaacaacttcctttggttccatgttacggtaagttgacatacctgtaccagcaggaatgattttaccgatgataacattttccttcaatccaagtaatggatctttcttaccgcggatcgcagcatccgtcaagacacgagttgtttcttggaatgatgcggcagataagaagctgtttgtttctaatgaagcttttgtaataccaagcaagactggacgagatgtcgcaggtgtgccaccagcaaccaatgtattgtagttttgatctttaaagtcagcaatatcaagcaatgtacctggcaagatatctgtgtcacctgggtccataacacggactttacgcaacatttgacgaaccattacttcaatatgtttatcgccgatctctaccccttgcatccggtaaacacgttgaacttcacgcaacaggtatgtttcaacggagattacatcgcgtacttgcaataagtgtttaggatcaattgatccttctgttaattgcgcaccacgatgaaccatatcaccttcgacaactttcatgcgagcagtgtaaggtaccgtatacgtacgagtatccgtttcacctttgacggtaacttctttcgtacgagtcgcagcatcttcagcaatctcaacgacttcaccagtaacttcagtaataaccgccaaacctttaggattacgtgcttcgaagatttcttggacacgaggaagaccttgtgtaatatcatctccagcaaccccaccggtatggaatgtacgcatagttaactgagtaccaggttcaccgattgattgagcagcaatagtaccaaccgcttcgccgacttcaacgtcatcaccagttgccaagttgcgtccataacaatgtttacatacaccatgttttgtattacatgtgaagactgaacgaatcgttaatttctcaacgccagcatcaataatacgtttcgcatctgcttcgctgatcagtgcatcagcaggcaatagaacttcaccagtttcaggatgcatcacggatttttgcgtataacgtccgactagacgttcttctaatgattcgatgatttcattaccttcacgaatcgcagagatttctagaccgcgatcagtaccacaatcttcttcacgtacgataacatcttgggcaacgtctaccaaacgacgagtcaagtaacctgaatcggctgtcttcaaggccgtatcagtcatacctttacgagccccgtgagtcgagataaacatttccaagacagatagaccttcacggaagttcgagatgatcggcaattccatgatttgtccattcggagcggccatcaaaccacgcatcccagcaagctgagtaaagttggagatattaccacgggctccagaatcagacatcatgaagattgggttcttcgcatctaaggattccattagtcgttgttgaatttcatctttggctgcattccaaacagcgataacacgttcataacgttcatcgtccgtgatcaaaccacgtcggaattgttttgtgatcgtgccaacttgtttgtgagcattgtcgatgatttcttgtttttctgctaacgccatgatatcggcaataccaacggtcataccagcatgggttgagtgtttatatcctaagtctttcatgcggtcaagcatcattgacgtatcagtaactttgaaacgcttgaagacttccgcgataatgtttccaagatttttcttcttaaatggcaagatgatttcttgttctttgatcgctgcaggaatatcggcacctttttcgacaaaatatttgtcaggtgtatgttgtgttaagttgaaatcagttggttcgttcaaataagggaattcttgcggcataatctcgttgaaaataattttcccaacagttgtgatcagcatgcgttctttttgttcttcagtaaatggcttgtcgcccaatgtattagggtcaacagccacacgtgaatgtaagtgaacatagccattacgccatgctaaaacagcttcattcatgtcacggaagatcattccttcaccttcgcggccttcttcttccattgttaggtagtagttacctaagaccatatcttgagatggtgtaacaacgggttttccatctttagggttcaagatatgcgttgcagcaagcatcagcatacgagcttcggcttgtgcttcttcacctaaaggtaaatggacagccatttggtccccatcgaaatcggcattgtaagcttcacacactaatgggtgaagacggattgcacgaccttcaactaggattggttcgaatgcttggatacctaatctgtgaagcgtaggtgcccggttaagtaaaactggatgttctttgataacttcttctaagacatcccatacaacgtcttcttgacgttcgattttacgtttcgcatttttgatatttgaagcaatttcacgttgaacgagttctttcattacaaatggtttgaacaattcgatcgccatttcttttggcagaccacattgatacatcttcaagaaaggtccaacaacgataactgaacgggcagagtagtccacacgtttacccagcaagttttgacggaaacgaccttgtttccccttcaacatgtgagacaaagatttcaatggacgattacctggtccagtaactggacggccacgacgaccattatcaatcagtgcatctaccgcttcttgcagcatacgtttttcattttgaacgatgatgtttggtgcattcaaatctaataaacgtttcaaacgattattacggttgattacacgacgatacaaatcatttaagtcagaagtcgcaaaacgaccaccttctaattgaaccatcggacgtagatctggcggaatgacaggaataacatccataaccatccaacctggttggttaccagaagaacggaacgcttctaagacatccagacgacgaatagcacgtgtccgtttttgtccttgcgctgttttcaactcttcttttaattccgctgattcaccatctagatctacatgatctaataattgtttgatggcttccgcacccattgctgcgtgaaattcttgaccatattgatcccgtttttcacggtattcacgttcagtcagtaattgtttcttctctaggcttgtattacctggatcgattacgacatacgatgcaaagtagatgatttcttctaacgcacgcggactcatgtctaacacaagacccattcgagaaggaattcctttgaaataccagatatgtgttacgggagctgctagttcaatgtgacccatgcgttcacgacggacttttgaacgtgtgacttcaacaccacaacggtcacagacaatccctttataacggattcgtttgtatttcccgcaggcacattcccagtctttggttggcccaaaaattctttcatcgaataacccttcgcgttcaggtttcaatgtacgatagttaatggtttccggtttttttacttcaccgtatgaccagcttctgattttttcaggagaagccaaacctatttgcatactttcgaatttatttacatcgatcaaaagggtttccctccatttcattttatcgtaagtcagctagggagtagctgacttacgtatgcataaacggcgttccagaagtagctgcttcggaaataagtctaaattccataaagctaaacacttctgatacaacctcttcagacaagtgcgactctcttataagtcttctgcagtttcgatttcttggatcaaatcagatttttgttccgctttttcagcagctgcttgctcttcgacttcttttgcagactgttgttgttctgcatatttcgtcaacgcgtcaactgtgatcaagtcatcatcatcatcgtccatatctcgcaactcaatttctttatcattaatatctaagacttgcatatctaaaccaagagcttgtaattctttcaccaatacgcggaaagattcaggcacacctggttttggaataggttcacctttgacgatggcttcgtaagttttcacacgaccaacgacatcatctgatttgtaagtcaagatttcttgtaaggtataagcagcaccataagcttccagtgcccaaacttccatttccccgaaacgttgtccaccaaattgagctttaccacctaatggctgttgcgtaacaagagagtaaggtccaattgaacgagcatgcaatttatcatcgaccatgtgggccaatttaatcatgtacataacgccgacagaaatacggttatcgaatggttcgcccgtacgtccatcataaagaacggtcttagcatctgctgccatacgagcttcacgaactgtttcccaaacatcgctatcttgcgcaccatcgaagactggtgtcgcaacatggatacctagttggcgagccgccattcccaagtgtaattccaacacttgtccgatgttcatccgagatggcacacctaatgggttcaacatgatatcaactggcgtaccgtctggtaagaaaggcatgtcttcttctggcataatgcgagaaacgacccctttatttccgtgacggccggccattttatccccttcatgaatcttacgtttttgcacgatgtacacgcgcactaacatatttacacctggagataattcatcgcctgcttcacgagtaaagatcttcacatcgtgaacgatcccgccgccaccatgcggtacacgaagagatgtatcacgaacttcacgagccttttcaccaaagatcgcatgcaacaaacgttcttcagctgataattctgttacccctttaggagtgactttaccaactaataaatcaccatcatgaacttcagcaccaatacggatgatacccatttcgtccaagttctttaatgcgtcttccccaacgttcgggatttcgcgagtgatttcttcaggccctaattttgtatcacgtgcttctgattcatattcttcaatatggatcgaagtataaacatcatctttcaccaaacgacggctcatgatgatcgcatcttcatagttgtacccttcccaagtcatgaaggctacgacgacgttttgacctaatgccaattcgccattttccattgaaggtccgtcagctaagatgtcgccgacttcaacttgttcacctaaaccaactaaaggacgttgattgtagctagttcctgagtttgaacgacggaatttcgtgatgtcgtatttatctaatgcgccattgtcgcgacgtacacgtacttcgtgcgcatctacgaattcaacgacaccatcgtttttacataataaagcggcacctgagtcatgagctgctttgtattccataccagtacccacccatggagaacgtggttggatcaatggtactgcttgacgctgcatgttggcacccatcaaggcacggttggagtcatcgttttccaagaatggaatacaagctgttgcgactgcgacaacctgtttcggtgacacgtccatgtagtcaactttatcaatcgtaacttccaagttttctgatgtagcacgagccataacgacttcttcagcaaatgtaccgtcatcgttcaacttgctatttgcttgggctactacgtaatggtcctcgatatcggctgttaagtaatcgattttatccgttactttaccagttgaacgatccacacgacggtaaggtgtttcgatgaaaccaaacttattgaccttcgcataagatgccaagctgttgatcaacccgatgtttggaccttcgggagtttcaatcggacacatacgaccatagtgagaatagtgaacgtctcggacttcataaccagcacggtcacgagtcaaaccaccaggtcctaaggctgataaacggcgtttgtgggtcaattcgcctagaggattcgtttgatccatgaactgtgacaactgagaagaaccaaagaattctttgatacttgcaacaactggacgaatattgatcaattgctgcggtgtcaatgtttcttggtcttgaattgacatacgctcacgaacaacacgttccatacgagctaaaccaatacggaattgattttgcaataattcaccaactgaacggatacgacgatttcctaaatggtcgatatcgtcgacattgccaataccttccattaagttcaagaaatagctcattgaagcgatgatgtcagcaggacgaactgtacgtactgaagagtcaggatacgcattaccaatcactgttacttcacgttctggatcttttggtgaaaagactttgatcacttgaacggtcataggatcagttacaactgcatcctcagatggatagtaagtaactgaatttaagccgccttcaagttttggtcccaattcttccatcacttggtgagtaagaacagttcctttttcaacaatgatttcacctgtttcagcatcaaccaatgtctcagctaaagttaagttcaatagacgtgttttaaggtctaattttttatttactttgtaacgaccaacatttgctagatcgtaacgttttggatcgaagaaacgcgcagttagcaagctacgagagctatcagctgtttttggttcaccaggacgtaaacgttcgtaaacatctttcaaaccttcttcggtacgagaatcgcttgggtttttgtgcaaatccttttcgatcgtattgcgcaaagattcgctttcgccaaagatttcaaaaatcgtatcatcagaaccaaatcctaaagcacgaactaatgtcgttaaaggaattttacgtgtacggtcaatacgaacatatgagatatcctttgcgtctgtttccatttctaaccatgcgccacggttaggaattacagttgaaccaaatccttcttttccgtttttgtccacttttccgtggaaataaacgccgggagaacgaactaattgagatacgataacccgttccgctccattgatgataaaggttccttgttccgtcattaatgggaaatcgccaaagaatacttcttgagatttgatttcaccagtttcgcggtttactaaacgtaagacaacatgtaatggcgcagaatagtttgcatcgtgtgaacgagcctctgcaaccgtgtatttaggttctttcaattcatagtcaacaaattcaagtgacaagtttccattaaagtcttcaattggcaaaatgtcttcaaacatctctcgcaagccctcatctaggaaccattgataagaatctgtttgaatttcgatcaaattcggtaattccaacacttcactgattcgtgcgaagcttctacgttctcggtgtttcccgtattttactacgtgtccagccaagttcttcacccctcttaaaagtttgaaaaccgatccgaagataaattacaataatgttacaaaaattaaattagtgtaacaagcgacattttttgcggcttttaggcaaaaaaaaaccaaaaatagaacgttctcttgaaaaattattcgcgagcttctacttttgtttccctattaaaaaccggaacggacaatatttcgttcctgccttttatcatttcagatagttttagcaaactcatataatacatgaggtaaacataaaagtcaatagtctcaaggctttgatcagagcttcgcaagtttttcttaaaactttcagcaactaataattgattcaattcggcttacatttttgaatattcagaatattcgactatttattattgacatctcatttttcttaacgtatactaatctacatcttaaacatgttggaggttgttcccatgctgaatatgaaaaactcacaaccgaataaccgctattactttagctattttagataggtttgtattcatcacgatggatacaaacaacttgagtgttttttgtatctatgatggctagagcatttcgatgtaccaacggccgcatagagaaatctaagtggctgaagaagtatactatttttgtactcgtatcacccacttggagtttcgatacttctaagcgggtgatttttttatgaatgaaaaaggatggaaatctagcttcaccagttaaaaaaaggagagaacataatgaaaaagacagtattggcaggaattggattggtaagtttactaatattaggtgcttgtggcggtggaaataaaacagacgataataatagtacgaaaacagtaggcgtcttacaattagtgcagcatccatcgttagacaatgcctatgaaggattcaaagaagggttagaagaaggcggctacaaagaagacgataatttaaaaatcgaataccaaaatgcgcaaaataatcaggacaacctgaaaagtatgagtgagaaattagtcaaagatgaaccagatttacttttaggcattgctactccagcagctcaatctttgctaaacgccacaactgaaattccgatcactgtaactgccgtgaccgatttagaagaggcaaaattagttaaaagtgataaaaaacctggcggaaacgtaaccggtacaacagatatggttcccatcgacaaacaaattgaactactattatcgatagttccagatgcaaaatcgatcggaatcatgtacaacgctggcgaagccaactcaaaaatccaagcagatcttgctgaaaaagctttgaaaaaggctggcgttgctgtaaaagtcaagacagccaacactacaaacgatgtacaacaagttactgaatctttagctggtgaaacagatggcatctatgtacctacagacaataccttcgcaagcgccgcagctgtcattggagatgttgttaaagaaaagaaaattccgttagttgcaggatcaacagaacaaatcgatggcggtggtctggcaaccgtagggattgactacaaatcactaggcaaacaaactggaaaaatggctgcaaaaatcttagacggggacgcaaaaccagcagatactccggtagaatctgctgataccctaaaattagtagtcaataaagagatggcagaagctttgggaatcgacccagacagcatcaaagaacctaaataaaggaaatagttaagtctagcttcacaaagaaagaaggaagaatcatgaatgttatcactttgttattatcagcgacgtcacaaggtatgctctggtcattattagccatcggagtttacatgacctttcgaattttagatattgccgatttgaccgccgaaggaagctttcctttaggcggaggaatcgcagcgattgggatcgttaacggtatgcatccagcaatagctactttattggcatttggtggtggaatgttagctggtttggttacaggtatcttaaatacaaaattcaaaattccagctttattggcagggattatcaccatgactggtttatattctgttacttcccgtgtaatgggggctccaaatattgcattattaggcgaaagtactgtttttacaggagctcaaaatctcggattgtcaaaaaataatgcggttattctagtcggactcttaatcgtgttgctagtcattctattattagttttatttttccgaacggagattggtttagccgttcgagcaactggggataatccagatatgagtgaggccaatggaatcaaaaccgaaaacatgaagctgttaggctacatgatctcaaacggaagcatcgctctttcaggtgctttattggcgcaaaacaacggctttgccgacttaaattcaggagttggtacaatcgttatcggtctcgcttcaatcatcatcgcagaagttctgctccataataaaccgattttagtccggctgatcacgatcgtcgctggagcaattatttaccgtttcattttagcattagtattcgaaatgaacgtcgagccaacagactctaaattggcttcagcgattgttctggtaatctgtttatcattaccgcaaattcgatcaaaatttaccttaaaatcaaaaaagaaaggggctgacaacaatgcaaccagtattaagaattaataatttgcatcaatatttcgaacgtggaacagttaatgaaaatcatgtgctgcgtggaatcaatttgagtttagcccctggtgaatttgtcacgattatcggtggaaatggtgcgggtaagtctaccttgctaaatagtgtggctggcacattaccgatcgaagaaggacaaatgtttttaaatgaggaagatatcactaaacattctgttacacgtcgctcaaaaaaaatcagtcgtgtcttccaagatcctaaaatgggtaccgcagttcgtctatcggtagaagaaaatttagcattagccatgaaacgcggtcacaaacgcggcttctcactaggtgtaaaaagtaaagatcgtagttatttccaagaacaattggccatgctaaatctgaacttggaaaatcgattagatgctgagattggtttactatctggaggacagcgccaagctatcacactattaatggcaacgctgcaacgccctgatctgattttattagatgagcatacagcagcactcgaccccaaaacttcattaactgtaatgggactaaccgagcgcttgattcgtgagcaagaattaacagcttttatggtaacccataatatggaggatgccatcaaatatggtaatcgtttaattatgcttcatcagggacagattgctttggacttgaaacaagaggaaaaacaaaatctgactgtaccaaaattgatggagctcttccatcaaaactccggtgtcgaattaaaagacgatgccttgttactaagttaatacacccccttctttcttggcaggctacttttatgtagcctgtttttttgttacactgagcccagaatgaaaataaaggagcgaaaaaattgtcgacgaaggaaaaaattttagcccgtctaaaagcagcaaaaaatgttttatccggcgaaaccttagctcaagaattaggggtatctcgtaccgcaatatggaaagcaatcaaagaattagaaaaaaaggggtatcagattcaacattccgcgaacggttatcgttaccagccttctgatattttagatgcaaaagaaattcatgaaggcattcatcaagacgtcgatataaccgttttagaaacctctacttcaacaatgaaagatgctcagcaggctgtaatggatggtaaaagatcacctttactaatcgtagcagatatgcaggaagcgcctcgagggcgtttcaatcgtcctttctttgctgcaaaacagcagggcatctatatgagtttgctcttggagcctaaggagcaattaacagaattaccacaatacacaatcttgatggcagttgctgtatccgaagcaatcgatgaattattaggtgtggatacacaaattaaatgggtcaacgatatttatttgaatcataaaaaaatcgtcggcattttatcagaagcgatgaccgatattgaaaccaactcactaaaatacattattattggtatgggaatcaacttctccattcctcaggaaaactaccctgatgagttgcaggaaaaagcgacttctttgtttccgaatggtcaagcaaccataacaagaaatcaattgatcattaacatctggaatcgattctttaatttattggcagatcaaacgacttacctggatgcttatcgaaagaaatcattcgtattaggtaaaaaaatcacttttaaacggaaagatcaatcctacatggggactgccatcgcgatcactgatactggtgagctagtagtcgatttaggggaggaaaaagttcatctctcctctggcgaaatcagcttaagctccattcaataaaagactgtagacattgtccataaaacggatcttgtctacagtctttctaattatctcattgttacaaattcttcgctgccagttggatggatcgcaacggtgtcatcaaagtctttcttcgttgcccccattttaatcgctacagcaaatccctgtagcatttcatcaacacccacaccaatcgcgtgcaagccaataattttttcttctttcccaagacataccaatttcatatcacatttttgacgatagtcacttaatgcaaaatacattggtgtaaaacgcgaatgatagattttaatctgatcttttccataacgttcaatagcactctcttctgataagccaatcgttgcaatcgttggatgtgtaaaaattaccgttggaacattttcataatctaaaaattcttctgttttgccattaaaaatacgttcggataagcgccgacctgccgcaatagctactggtgttaaatcaatcttgccaatcacatccccgactgcataaacaccttcactcgttgtattttggtatttatcgacaatgacaaagcctttctcgtttaacgtcacagaagtattctctaaacctaacttgtcagtatttggtatacgaccgccagcaaacaacaccttatctcctgtcagtgtatttccattctcaaaatagacagtataggtttcatcctcatttttcttgatttcttttgccacatgatgatcatacaacttcatcttattatcacgataaatatccactaaattatcggccagcattttatcaaatgtccgtaatgggcgactatggcggaaagcccaataaacttgcgtgcccatcccctgtagcacaccactcaattctgctgcaatataaccagcccctagaacaacaacttctttcggctgttcggtcatttcaaagaatccgttagaatcaatagcgtattcaccgccaggaatctccatctgacttggtcttccgccagtcgcaatcaagacattggacgcagtatattcttcaccgtttacactgacaacgtgatctgatttgaatgtcgcataaccttcaattcgttctacattattactatcaagtccacggtagtaggctccatgtaaaaagtcgatatatttttcacgacgttcaaccaactcattaaaatcaaattttccaacatcagcctgtacaccataactaggcgcatctcgctcaatcatctctaacatactgctagcctgccacattacctttttcggtacacaaccaacattgacacaggttccgccgattttattcccctcgattaacaagacttttgctccatacataccagcacgattagccgaggcgatcccgccacttccgccaccgacaactatgtaatcatattccttcattcatctgcctcctaattcacgtttacgttcattttaatacattctgcaaaaaaagaattgatttttgtccgataccattttctaaaaaaacacccgctaaaaatcagctttcttcccaatttagcgagtgatttatttatcagtcttttttcttacgaatcatatcaccaggtttgactggttgagcaacaggcatcgttaaaaccatcatagggttaggtgccctgtcgattgattcgccctcatcatttttcatttctgtaactgtctgttcaaaatgctgaaaatgtggtccgtaaaattcaatttcatcacctattttaaaatgatttcgttggcggacagtcgctattccgctaacttcatcataactcagaacttcaccaataaatttgtaaacaggaatctttcggcgcggaccaaatagttgttcattttcagtcggtacatggtaataaaatccagtcgataattctcgttgagctactttccacagttcatcgatccattcttgtttacagacataattatctggatcagccatatagctgtcaactgctgctttgtaaacattagatacagttgaaacgtaatgaattgatttcatccgaccctcgatttttaagctgtcaacgccattttcaatcaaatcaggaatatgttcgatcatagacatatctacggcactcatagaaaattcttccgtaacatcaccattttctgttaatgaacgatgttcttgagcgaaaggcatatcgaataattcatacttccagcgacaagattgcgagcaaccaccacgattagcatctcgcattgacatatgattggatagtgtacaacggcccgaataagaaatacacattgctccatggataaatgcttcaatttgaatatccgtattgcggcgtatctcagctaattcttccattgagacttcccgggccaacacaactcgttccagaccctcattttgccaaaatttcaatgtctccgcattagttgcagacgcctgtgttgataaatgaatctctaacccaggggcttctgatgcacaaatttcgatcaaagcaggatcagaaataatcacagccgagattccaatgtcacgcaacttcttgaagaacgctccggctccttcttcattaccttcatgggtcaccatgttcgcagctacataaaccttagctccatactgattcgcaaaagccaccccctcttccatctcttcaaatgaaaaatttccagcccgagaacgcaacccatatgcatctccaccgatatatactgcatctgcaccgtagtgaatggcggtttttaatttttccaatgtcccggctggtgctaaaacttccggccgcttcaattttctttctgtcatattgctattactcctatttaatcgctgttgggtctaaatgataaaaacctgtatccattcctcgaccaacaggatgatatttttgaatttcttgttgagcgttttcaaccatcgcatcatcccaagaattcgtttctattgctgctttagcctctgcaaaaactttagcaatcgccacaaaattcgctccaggtgtaaacaaaccatctaatttccatgtttgataacctgcttgattaagctctgacaattccttaatcaaattcaaatcattatcagcaaaaatatgtgtgccatgttgatcctcgtaaatcgaataatgtgtttctgcctttttgggttccgaaataaacaatccacgttccttagaagtactttccgattgcttcgtataattgaaataattatctagtagcgggcgttttgattgatgaatacaagtagcaccataaaccaaaacctccacagaaacttcgacatgctgactcaaacgctgcatttcttcaaaagggacttcgcgagccaacaccgctccaactgctccttttttctgccaaaaattgatttgtcgtgcattggtgactaaagtctccgcatcataaatgtatggcaaatcgtattcctgcaataaataaatcacacccgtatcaccaacaactacgtgatctggctttacatctgccaaaaaggctaaatattctggtatcttcttcatcttatcaggatgcatgataccatttatagaaacgttcacttttttcccattggcgtgcgccaaatcaatcaaagccttttgttcttcacgagaaaaagagtagggcagtcgtaatccaaaatcctcttctcctatgtatagtgtatccactccgacagctaataattcttcagcttgcgccattgattctgctgtcgcaattagttcgatcatggtatgtcctccttttagactttctcatactatcatagctacaaaaagtttccaactgatgacaaaaaaagagaatgacgttaaaacatcattcccaagttttttaaactttttctggtattttttcttcttttggatttttaacagttaatgtaatcttgcctttgctagccccaatagtcactgtatctcccaactgaatttgaccagataagagtgcctcagctaagcggtcttcaatttctttttgcaatgcccgacgaattggccgtgccccatattcaggatcaaatccaacttttccaataacgtcataagctgccgatgtaatcttcactttgatttcatgctccttcatacgatctaaaacagcacgactcatgatttttacaatctcatgaatttgttcttgatctaatgatttgaacactacagtttcatcaatccgattgagaaattctggacggaaagcctttttcaattcttctagaattcgtttttccatcattgcatgatctttactgatatccttcacattgaaaccaacatttttttcttcacgaatttccgtcgctccaatgttggaagtcataattaagatcgtattacggaaatcaactttccgacccttcgaatctgttaaatgaccatcatctaagacttgtaaaagaatattgaaaacatctggatgagctttttccacttcatctagcaaaataactgaataaggtttctgacgaattttttcggttaattgtccaccttcttcatatcctacgtaaccaggaggcgatccgattaaacgactcgtactatatttctccatatattcagacatatcgactcgaatcaatgcttcctcactgccaaacattgcttcagccagtgccttcgccaattctgtcttaccgacaccagttggtcctaaaaacataaaagagccaatcggacgatttggatctttcaatccactgcgcgctcgacgaatcgcccgcgagatagctttgacagcttcctcttgaccaacgactcgtttatgcaaaactttttccaaatctaacagtcgttgactttcttttttctctaattgctgtagcggcacacctgtccattgagaaacaactgctgcgacatcctcatcagtaacctgatcaatatagccgttttcttgcttagcagctttaattttggcttgctccaatgtttcagatagttgtttttcccgtaaccgtaaacgagccgccgattcaaagtcttgattttgaatcgccttttctttttctattactaaatcttgaatttcatcttctagctcagtaagctcagaaacttcatccgtcgaatctaaacgaactttcgcagaagattcatccatcaaatcaatcgctttatctggtaattgacgcgagttgatatatcgaacggataaagatactgccgcatgcagagcctcatcagtaatttcaactccatgatgatcctcataacgaggacgtaagcctttcaatatctcttccgcttcctccggtgttggttcttccacttgcactctagcaaaacggcgctccaaagcagaatctttttcaatatacttttgatattcatctaacgttgttgcaccaattgtttgcaattcaccgcgagctaacgcaggttttaaaatatttgaagcatcaatagcaccttcagctccaccagcaccaatcaaggtatgcagttcatcaataaatagaatgatttgaccatcatgataaatttcatcaatcactttttttaagcgatcttcgaattctccacgatatttcgttccagccactaaggcacccatatcaagcatcatcagacgttttccgcgcatatcttctggtacatctccagaaataattcgctgagctaagccttcaacaatcgctgttttaccaacacctggctctccaactaataccggattatttttagttcgacgacttaaaatttgaactacgcggcgaacctcactatctcgacctaccactggatccagtcgtttttcccgtgctaattttgttaaatcccgagccaatccatctaaagttggtgttccttgtgaattgctttgtacaggtttcgctggtgcttttcgtctactaccagtaccttgatttccattcgatgtttcatttacacccatcttctttaatagaagttgacgcatcttaggcaaactaagtcctaaattaactaaaatatgagaagctaagatttcatcatctcgtaatagccctaataatacatgttcggttccaaccaattttgcattgaagcgtttagcttcatcatcagcaaaaattaaaatttgctttgctctaggagaatagggtagataaccgccttcaggataagacttaactgatccgtatccagtcatatgctcgatttcttcacggatatcattttcgtttgaattcatttggcgcagtgttttgcctgctatcccttgttgttcaatcactaaagccagtaataaatgctccgaaccaaccgagcggtgtttaaagtatttagcttcttgttgtgcaatagccagcacggcttttgcgcgttctgtatacagctgatccatattcctcactcctttttctcataacttaaacgttctaaaaatccgtgaagaattcttgaacgtagtctattttcaatttgactgataccaagaacattcttcgataccgcactcaacatcaaattaccttctttttcagtaataatttcttcttcaaataatttttgaataattccaaaagcatttgtttcagatatttcacttccaaaagactccattaattgcttcaaaaaataatgctgatcagaaatcttaactttacttattcggatataaccaccgccacctcgtttactttcaactaaataaccccgttgaaaagtaaaacgcgtgttgattacataatttatctgagaaggcacgcaattaaacaactgcgccatctctgctctgcggatctcgatgatttcactattctccaaaatatctttcaagtaagactcgatcaaatcagaggtatttctgctcataatatcgcctcctattgactattcctgaccataattatagcgaatttagagcatgaaataaagaagaacgcctttctttaaattaggataaaaaaaaagaaggcattcaccttctttttgatcgggaagacaggattcgaacctgcgaccccttggtcccaaaccaagtgctctaccaagctgagctacttcccgataaacaaaaaaactacgcgcccaagaggagtcgaacccctaaccttttgatccgtagtcaaacactctatccagttgagctatgggcgcatgttcatattatgccgaggaccggaatcgaaccggtacggtgatcactcaccgcaggattttaagtcctgtgcgtctgccagttccgccaccccggcgttcttccctggtcttcaggaaagcggaaaacggggttcgaacccgcgacccccaccttggcaaggtggtgctctaccactgagctatttccgcgtgatgccggctaaaggacttgaaccctcgaccctctgattacaaatcagatgctctaccaactgagctaagccggcaactacaaaaaaataaaatgcgggtgaagggacttgaacccccacgccgtaaggcgctagatcctaaatctagtgcgtctgccaattccgccacacccgcatatacttatgagccgtactgggctcgaaccagtgaccctctgattaaaagtcagatgctctaccaactgagctaacggctcaaatggaggttaacgggatcgaaccgctgaccctctgcttgtaaggcagatgctctcccagctgagctaaacctccatgagttcgcgtggcgacgtcctaatctcacaaggggcaacccctcactacaatcggcgctaagaagcttaacttctgtgttcgacatgggaacaggtgtatccttctcgctatcgccaccacactagtatttaattgagtaaacgtcgttcactcaaaactggatcagaaacattctaacaaccgtgaatcaatttttggttaagtcctcgatcgattagtatcagtccgctccgtacatcactgcacttccactcctgacctatctacctgatcttctctcagggatcttactttcttaaagaaatgggaaatctcatcttgaggtgggcttcacacttagatgctttcagcgtttatcccttccctacatagctacccagcgatgcctctggcgagacaactggtacaccagcggtaagtccatcccggtcctctcgtactaaggacagatcctctcaaatttccaacgcccgcgacggatagggaccgaactgtctcacgacgttctgaacccagctcgcgtgccgctttaatgggcgaacagcccaacccttgggaccgactacagccccaggatgcgacgagccgacatcgaggtgccaaacctccccgtcgatgtggactcttgggggagataagcctgttatccccagggtagcttttatccgttgagcgatggcccttccatgcggaaccaccggatcactaagcccgactttcgtccctgctcgacttgtaggtctcgcagtcaagctcccttgtgcctttacactctgcgaatgatttccaaccattctgagggaacctttgggcgcctccgttactctttaggaggcgaccgccccagtcaaactgcccatctgacactgtctcccaccacgattagtggtgcgggttagagtggtcataacacaagggtagtatcccaccagcgcctctgtcgaaactagcgtcccgacttctacggctcctacctatcctgtacatgtggtacaaacactcaatatcaaactgcagtaaagctccatggggtctttccgtcctgtcgcgggtaacctgcatcttcacaggtactaaaatttcaccgagtctctcgttgagacagtgcccaaatcgttacgcctttcgtgcgggtcggaacttacccgacaaggaatttcgctaccttaggaccgttatagttacggccgccgtttactggggcttcaattcgtaccttcgcttacgctaagcactcctcttaaccttccagcaccgggcaggcgtcagcccctatacgtcatctttcgattttgcagagacctgtgtttttgataaacagtcgcttgggcctattcactgcggctgatcgttagatcagcaccccttctcccgaagttacggggtcattttgccgagttccttaacgagagttctctcgctcaccttaggattctctcctcgactacctgtgtcggtttgcggtacgggccattgttttctcactagaagcttttctcggcagtgtgacatcaggaacttcggtactattatttccctccccatcacaacttgtccttagagatgtaagcatttgactcacatcaagactcattgcttggacagacatttccaatcgtctgattccttagcctcctgcgtccctccattgctcaaacaaaaacaacgggtacaggaatatcaacctgttatccatcgcctacgcctttcggcctcggcttaggtcccgactaaccctgggcggacgagccttccccaggaaaccttagtcattcggtggacaggattctcacctgtctttcgctactcataccggcattctcacttctaagcgctccagcagtcctcacgatctaccttcaacgcccttagaacgctctcctaccaacacaccattggtgtgttccacagcttcggtaaactatttagccccggtacattttcggcgcagggtcactcgactagtgagctattacgcactctttaaatggtggctgcttctaagccaacatcctagttgtctgtgcaaccccacatccttttccacttaatagttatttggggaccttagctggtggtctgggctgtttccctttcgactatggatcttatcactcacagtctgactcccagagatgaatggatggcattcggagtttatctgaattcggtaacccgagatgggcccctagtccaaacagtgctctacctccatcattcttactctgaggctagccctaaagctatttcggagagaaccagctatctccaagttcgtttggaatttctccgctacccacacctcatccccgcacttttcaacgtacgtgggttcggtcctccagtgcgttttaccgcaccttcaacctggacatgggtagatcacatggtttcgggtctacgaccacttactcattcgccctattcagactcgctttcgctgcggctccgtcttttcaacttaacctcgcaagtaatcgtaactcgccggttcattctacaaaaggcacgctatcacccattaacgggctctaacttgttgtaggcacacggtttcaggatctatttcactccccttccggggtgcttttcacctttccctcacggtactggttcactatcggtcactagggagtatttagccttgggagatggtcctcccggattccgacggaattcctcgtgttccgccgtactcaggatcctcctaggtgccagtcaaattttgtctacggggcttttaccctttctagcagacctttccaggtccttcgactatctcactggactaccatatcggagtcctacaaccccaagaggcaagcctcttggtttgggcttttcccgtttcgctcgccgctactcagggaatcgatttttctttctcttcctgcaggtacttagatgtttcagttctctgcgtctacctctaatcagctatgtattcactgaaaagtaacatcctataaaagatgttgggtttccccattcggaaatctccggatcaaagcttacttacagctccccgaagcatatcggtgttagtcccgtccttcatcggctcctagtgccaaggcatccaccgtgcgcccttattcacttaaccttatcttgactttcgtcaagggtcttactaattcccatgagcgatcatgttccttagtaataaataagcaattgaacgtattaaaaaactcattcaacgcggtgttctcggtttgtttaaaattgtttctgtatccagttttcaatgaacgaatgatgactaacgtcatcaatggagcctagcgggatcgaaccgctgacctcctgcgtgcaaagcaggcgctctcccagctgagctaaggccccgatattgctatctaattgagagtagacctctcaaaactgaacgaataaagcattcctgtgtagtttccgtaacgttcatcttcgatgaactgattccttagaaaggaggtgatccagccgcaccttccgatacggctaccttgttacgacttcaccccaatcatctatcccaccttaggcggctggctccaaaaggttacctcaccgacttcgggtgttacaaactctcgtggtgtgacgggcggtgtgtacaaggcccgggaacgtattcaccgcggcgtgctgatccgcgattactagcgattccggcttcatgtaggcgagttgcagcctacaatccgaactgagagaagctttaagagattagcttagcctcgcgacttcgcgactcgttgtacttcccattgtagcacgtgtgtagcccaggtcataaggggcatgatgatttgacgtcatccccaccttcctccggtttgtcaccggcagtctcgctagagtgcccaactaaatgatggcaactaacaataagggttgcgctcgttgcgggacttaacccaacatctcacgacacgagctgacgacaaccatgcaccacctgtcactttgcccccgaaggggaagctctatctctagagtggtcaaaggatgtcaagacctggtaaggttcttcgcgttgcttcgaattaaaccacatgctccaccgcttgtgcgggcccccgtcaattcctttgagtttcaaccttgcggtcgtactccccaggcggagtgcttaatgcgttagctgcagcactgaagggcggaaaccctccaacacttagcactcatcgtttacggcgtggactaccagggtatctaatcctgtttgctccccacgctttcgagcctcagcgtcagttacagaccagagagccgccttcgccactggtgttcctccatatatctacgcatttcaccgctacacatggaattccactctcctcttctgcactcaagtttcccagtttccaatgaccctccccggttgagccgggggctttcacatcagacttaagaaaccgcctgcgctcgctttacgcccaataaatccggacaacgcttgccacctacgtattaccgcggctgctggcacgtagttagccgtggctttctggttagataccgtcaagggatgaacattctactctcatccttgttcttctctaacaacagagttttacgatccgaaaaccttcttcactcacgcggcgttgctcggtcagacttgcgtccattgccgaagattccctactgctgcctcccgtaggagtttgggccgtgtctcagtcccaatgtggccgatcaccctctcaggtcggctatgcatcgttgccttggtgagccgttacctcaccaactagctaatgcaccgcgggtccatccatcagtgacgcaaaagcgcctttcaaaccgaaaccatgcggtttcgattgttatacggtattagcacctgtttccaagtgttatccccttctgatgggcaggttacccacgtgttactcacccgttcgccactccttttctttcggtggagcaagctccggtgaaagaaaaagcgttcgacttgcatgtattaggcacgccgccagcgttcgtcctgagccaggatcaaactctcatagaaagtgtttgaaacagtcttgcgactgttaagctcaattgtattaattgacttgctagcatattgcttgctatgttgtttgcttctataatagaagcgccctacacatttggtttgttttattcgttcagttttcaaaggtctacgttgtttgtcgctttgtttcagcaacttttatatcttaacaggttaccgagtaaatgtcaacgactttttttgaagtttttccgaagagattatcgacatttttttctgcgactttgatagaataactgaaaatcagccatctgtcaacgataattttaggtgctccgaaaaattgttttctgtttcagaacataaaataatatagcagttttataggaattggtcaatgaaaaaataagaattttccccactttttttaaacccgatgaataaatataaatgttgtgttctttgttcgtttttttgatcaacaagccaattgtttcaacatctcaaagaattaattttcgtcattttatttttgatttttccttaactcaaggtactgagtttcgccttccttcgatttctttggtaaaatagtaatgtaattattttttatatggacggaggaacatttaatgaaagtattagttgcagatgatgacaaagaaattgtcgaactacttagtatttatttgcataatgaaggctatgaagttgtaaaagcatatgatggaaaagaagcgctaagtaaacttcgaactactaatgacattgatctactattattagatattatgatgcctgtgatggacggtatgcaagtcgtaaaggaattaagaaaagaatctcaaattccgattattatgttaacagctaaaacaacggatatggataaaatcaaagggctagttgcgggcgccgatgattacgtaacaaaaccttttaatcctttagaggttatggcaagagtaaaatctttattgcgccgtactcagatgcatgttgcggaggatcaaccagatatactagaaatccaatctttgattatcaataaagattctcatgaagtaaaaacagttgacggaaaagaaattcaattaactgctctagaattcggtatcctctatctgttagctagtcatccaaatcgtgttttcagtgctgatgaaatttttgaacgagtttggaagcaagaaagtatcgtctccgcaaaaacagtcatggttcatgtcagccacttacgtgataagatcgaagaagcgactgatggcgaaaaagtgatccagactgtttggggtgtgggctataagattgatgcaaaataacattgagaaaaaaaagcgtatcactctcacctcaaaggaagtcagtgaattaattgctgaaggtatcgtcacagttatcttattacttctattaaatgtggcgattatggttctattcacacaaatgcttcagaattctcctgatttaactgatgcaatctatcgttcaaaagatatttttgctaataactttgatagtgatatattttggagtggtcgtaattttgttattcctttctttatcattattgatggtttagttgttttttggcgtttgattcggcgttatcgacaaatgcagctccgtcatatcataaatgagcttcattacattgctaatggaaattacaactatcgaattcctttcgaattgcgcggtgatcttagtaaagttgttgatagtattaatggattggttgacagtactgttgctgctattgaagacgagagagagatcgaaaaatccaaagatgaactgatcaccaatgtcagtcacgatattcggactcctttgacttcaatcatcggctatcttggtttaattgaagatggtcagtatcaaagtgatgatgaaatcctgaaatataccagtattgcttataagaaggcaaaacaaatgaagtctttagtagaagatttatttgaatattctaaagttcgacagccctctgttcccgttaataatgtatcttttgatatggtacaattattagaacaattggctgcagactttgagctagaagctaagaaaaaagatattcaaatccaagtagagacacaggaaagtcaattggtaatggatggtgacacagaaaaactcgtccgcgtctttaataacctgatcactaatgcattaaaatatggagctgaagccgacaaaataatcatcgagattgagaaatcaaaaaatgaagccgtcgtcactgttaaaaacaatggtactccaatccccagagaagcccttgatcagttatttgatcgtttttatcgagttgatggttctcgttctcaagaaatcagcggaactgggttagggttagctattgcccaaaatatcattaatcttcatggcggctatatctatgctcaatcaaatgaggattggacgtcgtttattattcacttaccactttataagaatcaaataaagtctacgccggataatcattgactttaaatttttgattgcttatactgttctcaataagacatgcaggaaaccaagtacgtaagtttgtttttttagagagttgatggctggtgaaaatcaacaaaacaacttagggaaatccagtttcgcatactgcgttttttgaaagaaagaccgggtaacgtcgatatccgttaatcaagtgcagctttaggctgaatttgggtggtaccgcgaaattcaacaccgtttcgtccctgttcatgggatgagacggtgttttttattttaaaggaggaaaaatcaatgctagatgtaaaaatgatccgtaataattttgcagaagtaaatgaaaaattggcaactcgtggcgtcaaaaaagatgtcttggagcgtttcttggatttagacgaacaacgccgacaattattagtaaaaacagaagagcttaaaaaataccgaaatgatgtttcaggcgaaattgcaaaattaaaacgtgaaaaaaatgatgctgctgataaaattgccgagatgaaagaagtcggtgtaaaaattaaagctcttgatacacaagtggctgatatcgatgcacaattgactgagatcgcaacaactttaccgaacctcccccacgactctgttcctattggtgaagatgaagatgataacgtcgaagtacgtcgctggagcgaaccacgacagttttcttttgaaccaaaaaatcattgggatattgctgaagaattagatatcttagattttgaacgtggagcaaaagttgctggtagccgttttgtttattacaaaggcttggcagcccgtttagagcgtgctgtttataacttcatgctagacgagcatgtctatgaacaaggctacaccgaaatgattacaccttatttggtgaatagcaaagcaatgttcggaacaggacaatttcctaaatttaaagaagatgtcttccaagttgaagatcgcgatttaacgttgattccaactgctgaggtcccgttgacaaattactatgctgacgaaattttagatggaaaagatttaccgatttactttactgctttgtctccttctttccgttctgaagcagggagcgctggtcgcgatacacgcggattaattcgcttgcatcaattccacaaagtagaaatggtcaaattcagtaataaagagaattcttatgatgaactagaaaaaatgacccaaaatgcagaaattattctacaaaaactaaacttaccttaccgtgttattactttatgtactggagacatgggcttctcagctgctaaaacttatgatattgaagtttgggttcctgctcaaaatacttatcgtgaaatcagctcatgttcaaactgtgaagatttccaagcacgacgcgcaatgattcgttatcgcgatgaagacagtaaagttcaatatgcgcatacgttaaatggatctggcttagctgttggtcgaaccgtcaccgctattttagagaactatcaaaatgaagatggatcagttacgattccagaagtattagttccgtatatgggtaatgtaaaagttattaaaaaagaagactaatagttaaaactctgttcttaattttagtcaaaaatagagcggcctcgtattgtgaggccgctctgttttcgattatcaataatctgaaaatattaatcttttattgttcaactgaatagtttggagcttcttttgtaatttgaacatcgtgaggatgtgattcttttaaaccatttccgctcatttggacaaactgtgcattttcacgtaaatgttctaagttccccgcaccaacgtaacccattccagccttcaatccgccaatcatttggaaaataatatctgccgcagtacctttgtaagccactcgtccctcgataccttctggaactagtttgttcgcttcattgactccactttggaaataacgatcacttgaacctttttccattgctcctaatgatcccatgcctcgataagttttaaatcgacgcccttgataaatttcaaattcaccaggagattcatctgtaccagctaacattgaacctaacataactgcatgtccaccagctgccaaggcttttacgatatcaccagaatatttgattccaccatcagcaatgattgctttgccgtattgacgagcaacagaagctgcatcataaatggccgtcaattgtggtactccaacgcccgcaacgacacgcgttgtacaaattgatccaggaccaataccaactttaacaacatctacacctgcatcatataacgcttttgcgccttcagcggttgcaatattgccggcaattaaagtagcctcggagaatgtttcacgaatctcacgaattttacgtaaaactcctgcgctatgtccatgagcagtatcgattacgatggcgtcagcccctgcttttaataaagcttctgctcgttcaaatgtatcactagtaacaccgactgccgccgcaactaataagcgaccatgctcatctttcgctgcgttaggaaattcaataaccttttcaatatctttgatcgtgattaatccgcttaagcgaccatcttcatcaacgattggtaatttttcaattttgtgtttttgcagtgttttttctgcatcctgtaatttagtaccaactggcgcagtgactaaaccatcctttgtcataacctcatggattgggatatcataatctgttacaaatcgcatatctcggttagtaataataccgactaatttacgattttcaagcgtttctacgattggcacaccactaatacgatagcgactcatcaaatcttcggcatcttgtaccttatgttctggtgttaagaaaaacggatcaatgattacaccgctttctgaacgttttacttttcgaacctcatctgcttgggcaacaacactcatatttttatggataactccaagtccaccttgtcgagccatagcaatcgccattttactatctgttacagtatccatacttgcactcatcaatggaatgttcagtttgatattttttgccaattgtacactcatatccacttcattcggtaatacgtgactctcagccggaatcaacaaaacatcatcaaatgtcagacctttttttgcaaatttcgtttcccaattagacattgttcgttaccactccccagaattatttttaataaaaaaactaacagaatgaacgagtgaagtcaacaacttgaggcaaaatcctcatctaacctttatctttctatttattcaaaccatttttcaagaaattccgttgtaatttcactttcttcttcaataatctgatatgtcgttttatttgtttcagtatcgcgaattaaataaaagccttgcttattcataaaatcatctaagtgtattactgtataacgatcatctatttgctgaattcccttaaatacctcacgtaccaataattttgcttgatggatattcttttgtcgctggtgggctctttccactgatgcggtcaatgtgtaaccttcatctaaaaaatgcttaataatctctaccttgacaaccattggtaacttaaattttcgatttccgctcttttcacctgttgattctatatatcctttttgctcccaatagcgaatctgtcgaggtgaaacacccgttactttactcaattcactaatgccgactaataaatcatcactttctagaagttgcttgaccgtactatttttcacaatgcatccctctcttcatttctgattatacttttgctaacaatggtgtcaagtaagttgacaaagaaattgaatagcagtaaagttacagacgaacaattattgtttctgaaaatttcttaaaagagagaaggcgttagatcgtgagtaatacgcaaacggtcgatatttacggaaaaccctacaatcgttccttattagttgtagtactattaattggaaccttctgtacggtgttaaaccaaacattattaacaacagcctttccagcactaatgaaagcttttaatatatctgcttctagtgttcaatggctaacaactggcttcttgctggtaaatgggattatgatcccaatcagcgcatggctgatcaataaatttagttcaaagagattgtatctaacagcgatgacaatctttttgattggaacaataacttgtttcgttgcccccaatttttctactttattaattggtcgattaatccaagctgctggagtaggtatttccatgccattgcttcaaaacatcatgttgtcaattttccccccagaaaaacgcggctcagcgatgggaatggctggtatcgtcatcggtctcgctcctgctttaggacctaccctatctggttggatcatagatcattatacttggcgtgacctttttggtatggtcattccaattgtcattttagttttagtactagcattctttttgatgaaaagtgtcattcaattatctaatccaagtattgatgtgttgtcggcctttttatcaactgtcggctttggtagcttattatatggtttttcttccgtaggtaatgatggttggggcagctcaaaagttattagtttcttagtcataggggtattcgttatcggtttattcgtatggcgtcaactacatttagaacatccattcttagaactacgtgttttcaaatctccaacttttacaattgctgctattttaagcggtgtcgtaaatatggcaatggttggtgctgaaatggttcttcctttatatattcaaaatattcgtggtgaatctgcctttcattccggattgatgctattgccaggagctttgattatggggttgatgatgccgattactggtgcaatctttgataaacacggagctaaacgattagcaatcagcgggatgttaatcctaaccgcagctacgttaccatttgctttcttgactcaagaaacaccaattgtaatgattgttattctttatgcaatacggatgtttggtatatcaatggttatgatgccagttactacttccggtatgaatgctttgccaatgaatttgattagtcacggtactgcggtaaacaacactttccgtcaagttgctagttcaatcggtacggctgttttaatcagtattttaactaatgtcacaaaagacaacttgccaaaagcaagtttgctaaaatccttacctttgtcttataaagaccaagcaatcaacgccacattatctggttatcatgctgctttcttcgtagctgtaattttcggactagtgggctttattatcaccttcttcttgaaaaacaataaaaagatcgaaggagggaatgtaaaatgatttttgttatcacaattattagcgtaatagcatttgctttaacaaatatttttgctaaaaaagcttggcaaacattcctttcgattatattcgcagcaatattcttagttagcctaggttttattattgcaaacgatcacgatcactatggtatgaagagagtcactgaaacgactactcaatcattaacttcatctgctgatagcaaagatatgaagatgttgctttatcaaccacttggtaacggagaagaaaaagtttttttgtataaaaccaatgaatcacagataaaaccaaaatcaacgggaacagatcatgttacgaatctcgtaaaaaaggatcaaacaaaatctcaattaaaaataaagaaatcctattgggtctacaaaaataatactgcgaaattttggtttagatttactagtaaaaatcatctgttaatcgaagaaaaaaatatctttgaagtacaaaaaaattggctggttttaagtactaaacaagctaaaaagctagcagaaatagtacaagaaaataaaacttctatgcaaactgaagcaaagtcatttgtccaagataaagtgaaagaagctctgatgaaaaatccaactttgaatcaagcagcacaacaaaaaatcattcaacaagccactgctgattatcagcaacaaacaatagcaaaaataattgctaaggtaacaaaataaaaaagaagcaaagtcccttgtgggatttttgcttctttttattatcttcttggcgccgttgctaaactactaataataccgaaacgtttctttaagtaataacgtaacgccaatgccagacccgatagtataatcataaccattggatcaaggattgggtttaacgctggcggtaataatgctgctccattaaaaaccaagaaccagacaatcgtaactgaggccaacataagtattgttttccacgttttcggttttttcgatttatccgctccaggctgctcgaattggtaaacaaataaatacatcatatagaacactaaaccgccgacggcagaagctacgatcaatgttgttaaaccataggtcacagtttgtgttccacgtgaaacaaacaatcccatgatccctgcaacaactcctaatagaccaaataacagtaggaaattgtcaagccacatcagtgatgcggtagtcgattttttctgttcagctggtttgttaacaattgcatccagtcgctctgaaactgttccaaataattgacgcgcggttttcccagttttttgttcctcgactaaaattggcagcatctcatttaaggctacgatagtttgttcatctgttaaattcgctgcttttaaagcttttttcaagtcaaaaatatactgttcgttacgtttagtcaacttcgcttcaagttgattgttttctgcttgcaacgtttgtaacttttctggttccattgtttctttcctccctaaacgttgaaacggaacaacatgacatcgccgtcttgcacaacataatcttttccttctaatctcacacgtccagcttccttcgccgcatgcatactgccatatttatctaaatcatcaaatgatactgtttcagctcgaataaagccacgttcgaagtcagtatggatgatacctgctgcttgaggagctttagtaccttttcggaacgtccatgctcgaacttcttgctcacctgcagtgaaatatgttgctaaccctaataagtcataagctgttcgaatcaattgatctaatccagactcttcaattcccattgcttctaagaattctgctttgtcttcatcgtccaactcagcgatttcttcctccgcttcggcacaaacaacgatcacctctgaatgttcactagcagcgaaatttcgcacggtttgcacatattcattgctgtcaggatcagcaacagtatcttcatcaacatttgctacataaagtactggtttacttgttagtaaaaaaaggcccttaacaattttttgctcttcttcagtaaattcaatcgtacgagcagattgtccttcttctaaaacaggctttaatttatccagaactgctagttctgccaccgcattcttttctttagttttagctacttttgctacacgagtatagcgtttatttacagaatctaagtcggctagaactaattctaaattgattgtctcaatatcttctaatggatctactcgtccttcaacgtgcgtgatattttcattgtcaaaacaacgcaccacatgacaaatggcgtctacctgacgaatatggcttagaaattggtttcccaacccttcacctttactagctcctttcacaattccagcaatgtccgtaaattcaaatgttgttggaacagtttttttcggatggactaattcagttaaacgctctagacgccaatcaggaacttctaccatcccaacgtttggatcaatcgtcgcgaaaggatagttagcagcttccgctcctgctttcgtaattgcattaaataaggtagatttaccaacatttggcaatcccacaattccggctgttaaggccatgttctacttcactctttctctgttaagaattatttctgagatagatcaactttcttctcaaggatttttttcattttcttctcaaaatcgcgtcttgtcatcatgacgatatgaccacaattgatacacttaattttaatatccgctcccatacgaatgatttcccagcgatttgtctggcaagcgtgcggttttttcatttcaacgatatcacctaaatcatacatctggcaaacctcccatttcgtattcatatatattgtctaagattcatcaaaatgaatattcaaaatatctaagatacgcgtcaaatctgatggtgacaaatactcgattgaaattttgcctttaccgtctttctcaacgatttcaacacctgttccaaatttatccatcaaacgatcttcgctttctcttaaatagtaaggtttttccttggttaatcgaggaccttttctcttatctttcgctttcccctcgttgtattcagtaacaatctgttctaattgacgcactgtcagattctcttttactgcgcgattcgctagtttcaagatttgatcttttttctttaaccctagtaaggtccgagcttgccccattgacaaacgttcgtcctgtaccatttctttcaccagtttaggcagggtcaataagcgtaaataattggcgatatacggacggcttttccctaatcggttggctacatccgcttgcgtcaatttcaaatttttcatcagcatttcataagcttcggcttcttccaatggattcaaatcttcccgctgtaaattttccaatacagcaatctgcatcattgcctcttcatcaaactcgcggataatcgcagggattgtttcttttcctgctaattttgaagcacgaaaacgacgttcaccagcaattagttcatacccttttacagctgattttctcacaataatcggttggaagacacctgattgctcgattgaattagctaactcttgcaaagacgtttcgtcaaatgattttcgcggttgataagggttggggcgcaaatcactcaaaggtatttcaaccacttgatcgttttttatatcgacttcttcaatttcagaaagatcttgaaacaaagcatcaattcctcgacctaatcctttatttttgctcacgaactaacacttcctttgctagagcttgataaacttcagcaccttttgatcgtggatcataatcgatgatcggtttgccatggctaggtgcctcagataaacggacatttctcggaataattgtatcgtagactttttcttggaaataacgacgaacttcttcaaccacttccgcaccaagatttgttcgagcatcatacatagttaacaatacgccttcaatctctaaaccaggattgaaatgtttttgaactaaacgaaccgtgttcaacaattggcttaacccttctaacgcataatattcacattgaaccgggatcaaaatcgcatcactagctgtaaaggcattaattgttaaatgtcctaatgatggtggacaatctactaaaataaagtcatattcatcacttacttctgccaaagcactttttaagcgtgactcacgagccatcatagaagttaattcgatctccgctccagctaattgtaaagtcgcaggaacgattgacaaattttctcgtgatgtcttaatgatcgtctctttaatggaaacctcattgactaaaacgtcataaatatcttgttttacatcgggtttgcgcacacctaaaccacttgtagcattcccttgtgcgtcactatcaatcaataagactttctttccgtcttgagctaagcacgctcccaaattgacagttgtagttgtttttccaactccgcctttttggtttgcaacagatatgatccgtgccatctaatttcctcctagttcatattaaagtatttattttccaaaagaaaataagtgatgtttatccatttaaactactttaatggctgtttgtttggtaggcctggtttacgtggatattttttcggtgtatcttttttcttctgcactgtaataatgtgccgtgtatctccatttggtaatgaaacatcttcagcttggaggagcttaccgcctaataaagcaattgccggtttcgcttctactaattcctcttcactttttgctgcttttaaagcaaaaaagtagccattctttttgactaacggcaagcataattctgttaaaacattcagacgtgccactgctcgtgcggtcacaaaatcaaaagcttcacgaaactcagaattttgcccaaaagactccgccctatcatgatgaagatacacaccttctaattttaaagtctctaccaacgttgtcaaaaatgtgattcgcttatttaaggaatccacgatggtgacctctaactctggaaaaacaatttttaatggtaaactaggaaacccagcacctgaaccaacgtcacataactttcctttcgctgtgaacgcttcagaaaaagccaatgtaatggaatcataaaaatgttttaggtagacctcttcacgttcagtaatcgcagtgagattcatttttttgttccattcaattaataagtgaaagtaggacgcgaactgatccatctgctttgcagataattcaattccctgcttgcctaatttcgcttgaaattcttctggtgtcataagaaatcctttcattttcgtgaaacagaaaaatgtttcacagactattctctactttaacgcattattgctttacatgcaatggtttacgtatgtttcacacagagattaagaaagctttactctccttttttaatatttcctagaacgttgtcatggattttttttattatattttttgttttcccttgctagattctagatcattaaagtctatatgaggaatactttttcataaaaatattcaaattgaacaaacgagttatcagcaaaaaatcaatcaacctatccttattctaattttgataattgcctatcaaataaaatgctgtatcagagacgaatgaatgtgtctttattcacaaaaacgcattttagaaagcgcttagattgagaatggttgaacaaagcggttttttatcatagatttctttatgttcaaggtgaaagtaaagctataatatctgataaatcgcagtgatggcataaatgttagagatgtgctgaagtaatgattttactgtttgcatcacaaaaaagcgcgaaaattacactgaagatactctaattactatttcctttaactctctattagaggtgaataaccgtatttctgatcagctctttgtttctattctacatagtggcttttaccccagagcagattattgccgcagaatcaaaagtgattaattgagggaaataagaaactctctcattagaaaatcgttatttttaacgttgtttacaagcaaatttgactcttgatccttaaaaataacttgcgtgtttcacatggaacatccaattaacttaactacgcttttaaaaagagatcagaccctttatattacggggctgatctcttttaatatactattacattagatcgtttcactatcaaccttcgctatctttccttgctccacatacaccattagaatactgatatctgcagggtttacgccactaatacggctggcttgagcgattgtctcaggttgaattttttgtaatttttgctttgcttctgttgctaacccattgattgcctcataatcaattcgctctggaatgcgtttggcttccatccgcttcagcttttcaactttttccatcgctttttttatgtagccttcatattttatctggatctcaacttgttcaacttcttttcctgtcaaatcatcatttgctggaataaattgtaacaattcttgataagtgatttctggccgtttcaagaaatcactcgctaaaacaccatctttcaattctgcactgtttttagctcttagaaagctttgaacattagcagtgggttttatgcgaattgattgtaaacgagctatctcagcttcgatatgcgcctttttaactaggtatgcttgatagttttcttcttcaactaagccgatcttatgtccaatttcagtcaaacgtaaatcagcattatcatgacgtaaaatcaaacgatattctgctcgtgaagtcaataaacgatacggttcattggttcctttagttactaaatcatcaatcatgacaccaatatatccatcactacgtttcatgataaatggttctttcccctgaatcttcaaagcagcattgattccagccattaatccttgaccagcagcttcttcatatccgctagttccattggtttgtccagcagtatagagattttcgatcactttcgtctctaaagttgggcgtaattggtgaggagctaccatgtcatattcgatggcatagcctgtccgcatcatttcagcgttttctaaaccttcaatcgaatgtaaaacgtcattttgaacatcttctggcagtgaagttgataacccttggacatatacttcttctgtattacgtccttctggttctaagaataattgatgacgttctttgtctgcgaagcgtacaatcttatcctcaattgatggacaataacgagcccctaccccatctacaatacctgtaaacatcggtgcacgatgcagattattttgaatgatttcatgacttttgggattcgtataggtcaaccaacaaggaatttgttccgttaaatactgactatctggcgtttgataactaaagtgattaggtttttcatcgccaggttgaatctctgtttttttgtaatcgatagaactagatttcactcgcggcggtgttccggttttaaaacgatgaatttctaaacctaattcctgtaaatgatcagctagtttgattgatggctgagagttattaggacctgaagaatattttaattcgccgataataatctccccgcgcaaagccgtccctgctgtaataattacagccttcgctgaataaactgcacctgttgaagtgacaacacctttgcaaataccctcttcaacaactaaacgatcgacgactccctgcttcaaagttaatttttcttctttttcgatcgtgtgtttcatttcctctgcatacgcatgcttgtctgcttgagcacgcaaagcgcgtactgctggacctttccctgtatttaacatccgcatttggatatatgtcttatcaatgttacgtcccatttcgcctccaagtgcgtcgatttctcggacgaccactcctttagccggtccaccaatagatggattacatggcatgaatgctaccatatctaaattgattgttatcaacaaggttttttgtcccatgcgcgctgttgctaaagccgcttcagaacccgcatgacccgcaccaataacaatcacatcataatttcctgcttgatattccatatagtcgctcctttactattttcctaaacaaaattgactaaataattgtgtgattaattcatcttgcacactatctccaacgatttcacctaaataatcccaacagcgtgtcatatcaatttggacaagatctacaggcatacccgccataatgccattttgaacctcgtttaatgattgtccagccttttctagtagtgcgatatgacgagtattcgatacgtaagtggcatctttttctccagtttgaccgccaaaaaaaagttttgcgattgcttcttcaagttgatctagtccagctttctctaaaacggagattgaaaagacttcatcttcactcaaatatgcagaaagatccgtttgcgatagatgactcggcaaatcggttttattcaataaaacaatgcgttttaatccttgtgtcgcttccaatagttctctatcttccgcagttagggcttcgctttgatttaggactaacaaaatcaaatctgcctctcctaatgctttacggctgcgttctactccaatgcgttctaccacgtcatctgtttcacgaattcctgctgtatcaatcagtttcaaaggaaccccgcgtacattaacatattcttcaatgacatcgcgtgtagttccggcaatttctgttacgattgctttttcttcatgtaataaataattgagtaagctcgatttccccacatttggacgaccaataattgcggtacttaaaccttcgcgcaagatttttccttgcttggcatttaataataacgcgtcaatctgttgacccacttgttgggctttttccaataataattgagtcgtcaattcttcgacatcatcatattctggatagtcaatatttacttcaacttgtgccagtgtttctaaaatttcttgacgtaaacgacgaattagatgagataaattgccatctaattgattgatcgcgacactcatcgctcgatctgttttggcacgaatcagatccataacagcctctgcttgtgataaatcaacacgaccgttcaaaaatgctcgtttagtaaactcacctggctcagctaaacgtgcaccagagcgcaaaattagttgcagcaattgatttactaccacaataccgccgtgacagttaatttccactatgtcttcacgtgtaaaggtcttcggtgcacgcatcacacttaccatgacttcatcgactatttcttgttcttctggatcaatgatatgtccataatggatcgtgtgtgatggaacatctaacaaacttttttttccgctgtgataaacactatctgcgattgctactgcgtggtcgccactcaatcgcacgatactgatcgcgccttcacctggcggagtcgaaattgctgcaattgtatcaaattctaaggtgatctctgccacttgttttcctcctattaattaagaacataaaaaaagtgcctactccaccccttgaaaaaggagtagattgagcactttgactgctttttctacaaaattctggtgttagattagcatagatctttcaacaattcaagttttcttaccaaaatacctgctttttcaaattttgtttaagaacttctataactaaaatagatcacaaaaaagtgcggagcaggtcaactgctccgcactattcattttaaacagaattagaaatattttttcgctggttcaacaaccaaataacgataaggatcttcaccttcagaatgggttttgatatattcatctttactcaaagcagaatgaatcatttttcgttcaaaggcaggcattggttctaaaaataccggacgacctgtttccttaactttttccgccgttcgttgcgctaaacgcgttagaacttcttcacgtttttgtcgataatttccaacatttactactactgataatttttcttttgcaacgcgatgtaagaagacttgagctaaatactgcaaagcattcaatatcttaccatgtttaccaatcagcatcccctgcttgctagtttctagattcatgacaatcaaaccacttgcttcatgctgaatcttaaccaaagcaggcacacccatatcattcgtaatattcgttaagtaaagcgccaattctttgacggcctcatcttcatccaattcaactaattgactaggtgtgtctgttgtttcaattggcttcgatacttcttcttcaagcttctcctcgacaaactgttcttttattggttcttcagccgcttcggaagtaacgatatttttttcaacaataattggttcaatcgagacacgagcatctttttttcccattcctagaaacccttttttcgcgtctgataaaatttcgatatcgaccgcttctttctttaaccctaaagcgtgcaatccctttgaaattgcttcgtcgatcgatggtccttcataaacaggcattttctaaacctccttatttatagttgatggatagtcttattttttccgttttttcttcggatgcttggctttttgaagcgcacgttctctttcacgaatttgacgagctgcttcttctctttcacgacgaatcttgaaaggattattaattagtaacgtttgaactacttggaaagcattcgaaattacccagtacaatgataacccacttgctaaatttaatgccataacaaaaatcataactggcatcgcaaaattcatgattttcaatgaagcattagattcaagctgactcatgctagatagataactacttgcaaaagtaaagactgctgcaaggataggtaaaataaagtatgggtcggattgactcaagttcaaccatagaaaatgaccagaccgcagttcaggaattcgtaaaattgcttggtacaaagccatcattacgggcatttgtactaacaacggtaaacagcctgcgtaagggctcacattattttctgcatagagcttttttgtttcctcttgcaatttctgttgtgtctcttgatcacgtgtactgtatttttgttggagtgctttgatcttaggctgtaactcttgtgttttacgcatactctttgtttgaaaatgcataagcggcattaaaataatgcgaatgatgattgtaaatagaataatccctattccgacattaccaaaggacaaccctttaatcgcttggccgaaataataaacgacataacgatcccacacgccgctactgcttgcactgacttcaccagttccacaggcggataacaagaagacgagactcagcaatcctgtcattaatagtatttttttatagttcttcacttacatctgtttccttcctaacttaatatttttgctaattttaagacatgtataagattcgaacgcatttcatcatgaggcagatctttcgtggctgggcgagcgatcacgataaagtctataggtggtaattcagttttcaattcttgcaaaactgctcgaatttgtctttttacttgatttcgtgctacagcattcccaacttttttaccgactgacaaacctactcgaaaatgtttttgaccagaaggttctagacggtaaactacgaattttcgattcgcaaaagaagcaccttcttcaaacactttttgaaattctcgttcttttttgacccgatattttttctgcatctagtttccttcgtttcttttaaatctatacctgacaataataccatacttcaaattaaggaatcatccttatttatcagaaaaattccttaagaatcacattttggatacaaaaaaaaccactgaccggcagtggcttaagcagcaagtacttttcttcctttacgacgacggcttgctaatacgcgacggccgtttttagtgctcatgcgtttacggaatccatgaactttttgacgtttacgtttattgggttgataagttcttttcattaaaatacacctccatagctaactttacatagacatacccgaatattataacgactcattccctactttgtcaatcatgaaatgaaaacagcgagtgaaattcgctaaaattttatgtttcatcttgtattttttttatcagattaaaaaatcagctctttatttttcgtaaaaacgctgttcatttgaaaattcttttattaccaaaaaggaaaatttatccacaaaatctggggataaactctaactaattgtgtaaaacttttttccacaaaaaaacttgcatagaattttcaaatgctttttccactcttttttatctttttgataacttgtccacaaggtggataaattgtgtgaataagttcctatattctttttctatcaagctcttctttttttcggttttgtgcatttttcagtggaaaaagtgctttgtccacatttttcctaatagttgtggatatgtttttgcatagacgtggatagtttttttgtatttttatacattatgtggaaaaagagaaatttctttctattttgttcctggttgtggaaaacttttgaaaaaaatgataaagtatgtctatctgaatttattaataggaggcgacttat

SEQ ID NO: 152 - DNA, 1232839 bp, Enterococcus avium
  source 1..1232839: mol_type = genomic DNA
gagccgtcgctttttgcgtaacttaattacgtgatgaagattattatgttgtagcagcttttgtgaatggcgtcattcaaaaaaaattaaagcattgcttctattattgtgagtagatagacaccaaataattaggtctaaatttgattatgacccaattatttggttaggagaatttactatggaagatgcattacacgagaaagacttactatctttttttaaagaaaacccgattgtagctactcatttgattcagacaaataatctcattgttgaaatcgacgccgatgtattagatgcggcattctattttttgaaagagtagcatcccaacacttttttatctccagaacagaaaatgtataactattacatttctccacaagaagaaaatacgatcgtaaatcaattacacgtagacgctcctttgaataaagttaacgacaatttctatacacctaaacttgaaaaattattgattgaaagttagggcggctaacttagttgttgagcctcatgatcaaaataaaaaagtacacagaaagatctctgtatactctaaaatcgtatttttgatgcaattttcactgatactacttgtcataatcaattgccgcccctgatacaaatgatttacttaataggataggatcactgatattaggctcttctttatataaagataagcaagctaaatcaaagtaaaaattgtaaaaggtttcaatgtatttagagtaacgagatgtttcattgccgttgcccatatttaatgcgtagcagtatgaaatttttttgatctcagctgctaaaatagaatgtctgccattgcttcagtctggaattagaatatttttgatctttaaaccgatcgagcaaagtctactactggaaatactgactcgacacacgggactaaacgccctttttgttaggagaaacatctctacatcggaacaatcgacctttcaatcggaacaaggactatctctaaaattacgtgcatatgagctgattgatctattgcatcgcctactctttcatcctttttgccacaaaaaaccgcttggggctttccctaacggtttttttcgtgtttctctattttggcatattattttcgtagtgtgaccaagcagaatataccttaactactttattcttcttatcaatcgtataaacaactctatgctttccattgattctcatagaatacattagcttgttttttggacgtaattgctcaaaatttctaatttgagtataagggttcttttttagcgtttcgatgatttcttcatagtcagatagcagatttattttttctaacagcggtaaatgcttttttttaacttctttatggactaataccttccaatcgctcaattatgcttcctcaaaatcatcctcagattcgctttccataaggctaaatacattatcaagcgtacctgttctatacaaatataattcttcttgaatcgcactccattcacgtttagacatcatgattactccatcatttaccccctctttattcgttaaggtaacttcaatctcgctgttatcagttgctacgcccttcaaagtttcaaataaattctttcttaaattcgttggtgtgattacttccatgacaagcccctctttctacatgtacgttatcacgtacattataacgtacatccttagttttatcaatcttctaactccttataaccgtcaaaataagcctccatttgaatttttggagccgtcatctttttaaatcacgacactatttctagaccttcctcatttcaactttctcctttactcattaagaaaaccttaagtcaaataaaaatgtttagtttttttagaagatgtttccattctacaaacactatcaaatcaacattacttctccacgcataaaacccaaaatgtgtcaaagtaggcaaaattacatgaggctatgaaaattactggcttctttcatttttcacaaagtaaaatcctgttcttataggatttgtgtaaaaaagagattgaaaactcctgcaattttgacccccaaatgtaattttgccggttttgaccgagtttgtatttcccctttatcgttaagtcaccgaccggaacaaaaaaaatactataacggaggaatgaaaaaatgattcaaaaaatcggcaacaaattacaagtacaaatcgacgcaggtgaagacaaattaagaaaggtgaacttccaaaacgtcatcgacgaaccaaccgaagaagcggtgctagagcttggcgccatcctgacagaactttcaccagaaggcagcaacctagacggtgtgctcctaactagccaatctcggtataccaaataaggaaggagaaaattagatgtttaaacttgtcgcaacctttacaaccagcttaggaaaaaaacaaacctggagcctgaataaccctgatccaaataagacgcctactgaggtcaaaagcctcttacaacgtctaatcggcatcaagcttttccataaagacggcgcggaccttttcaacacagtcgaaagcgcaaaatatgtggaaacaactgaaacgatcctatttgataacacacaggaacaacagtaggatattgctttactaaatttgagaagtcgcggtagacgtaccgctcttctctattaataaggatgtcagttcttactttagcaattttaaaagaatgatatacggcatttgaatcgaacgatttttttctcttggaaaaaattattactttaaaacaaataaggatgtcagttcaacttttcgcaggtctcttagttagaaaaataattagcattaatagctagtttatcgttccagcactttagttgaatgatatacggcattcgaatcgaactttctttttacaaaaaactacttcaaaacaaataaggaggatgaagatccatgaatgaaccacttttaacgcaccaacagattttcacactaaaacccgaaacacttgaggcacgaatcatgaccttttatcaagaaacacagaacagcagcttaacaattaaatatattatggctttacgcatccgttttagacttggtgcgcaggagtttgcgaacattctcagcgatcttgtccgctatttgtttatgaacaccaaagcaacacgtaccatgaagcgcttcttttattattttcaggattactttgcggcgcctgaatggaaacggctgacgatgagggtcttccctttgagaaattttggcaagaaagtcttgtctgtcgctcgttcactggtttcatttgtacgtcctgaagaaatgactgagccttaataagaactaccctacgcagaaaataaatgagaggaaagaagaaaaatgatcactgagtctacaaaattggtcacaactttttttaacagtgaccgcaagaaacacaactggacctatcaggacgtggatacgagcttgtcggcagaagaaatcaaagaagcttgcgaactattaacgaccttagacctttttgaacaagatggcgtaaaactatttgattctgttgtcacggcaaagtttgtctctaccaaggtaaccacgctgtttgacctgaaaaacgagattgatgtggatcaaactgaaccgttttatgaagcgacctgtgaaaaggttggctgttttgaagtaccagaaaaacaggagaaatccgaacacgtgccgctccagattcctgtggcgattgtgccatttagtaaaacacaattatcgttagaaacgaatgaacccgtcgcacatccagcaactgtagccgcacctgtcaaacgatcgactaaacagccaacaagaaaagatgcaaacaacaaaaaaggcctgcttcaacgaatgttcaggcgaaaacagcggaataaagacgacccagcgaatcatgaatcaagcacttaatcgctaatctccattctatctagcgtaggacaaatgacacctgcgagctaaatcgcagatgttgattaaatctatttgaaagaagggaattgaaatgactgttttatcaattttatctggaggaacactcgttaactatctattcggcggaagtgtcccaatcatgggtgtctttttgacgatggttggcttagacctttttactggctacgccaaagcactaaaaagccatacgtgggtctcctctatcaatctttacggactgtttaccaagttcatcacgttctcaacaattatctgtgccgctgctttagacatactagcacctgtcgttggcatcgatttgcctattaatgtcgccttgatttggaccgctcttctgattctgtacgagattggttcgatcttagaaaatgcccatgcctttggactaaagatcgcgtggctgcagaaatggctgcgagtgtttgaacgggatgtcggggatttgcctgataaggatgatcaagagaacaatgtataataaaaaagagaatccaattgcaagtgctgaagtggacttgtaattgggttgtctttgcgtggggaaatatagtatggcttgaatgataaataatgtgcaaaatccgtcagttgttggtctgatataatttccccttcttgtaacatgacaacactctttccacctgctcgtttttcctcccatttatttcttagaaaaacaaaaataaatgataaaatgatagcagaatactttttggaaagggaaataaaatgtcagttgaaagatatggaacgtttttactattactgaggctgtacaatgaatcgccgacaaactcaacggagaaaatactatcaaaatattttctgaagcgatttgatgatataaaaagcatcaatatttacgatgtttctgcggattgtcacgtctcaagagccactgttcggcgttttttctcaaaactggatcatgagagttttttggatttcaaaaatgagtttacgatcccatacgatatcagtatgtttgaaaaggaactagatagaaaagactacgtaaaagaacacattcagcaaataaatgagattcagaaattctttttgaataataactctaagattcttgagaaaattagaacattggcgaaagtcatgcataatgctaaaaatatttactggcttacctctacttcaacaacacgaatggtagaggatatgcaaatgcaatttttgagatttaactctttttgggatatcatcatcaattacaagaaggatagcgacatacaaatagaagaaaatgatgtagtcatcgtcctatcctccagcagtgtcatggcgcattcgattgttacagatctggaagaaatgacgtgtccgatctatcttgttactttgaataatcaatatactcactcagtctttaccgacattatccgattaacagacagcactctttacaattttacggatcaaatttcaaatgaaacggtcaaggaagaggtcgtaaacagaagatacgcgacaaatttgttctttgactttttatactatgaatacgcaactattgataaggaagtaaaacatatgcaaaaagaagctgaatgatcattttcatccagcttcttctttgtattttgaaattaactagtcatcgcttataccttactcatttttcttctttttaagaaaatcgtcgccagaaaaccggcagctcctgatacgacaatgactaaaatgcctgcgtacatattcgatagacccgtatatggagccttcgagataaccattgttgctaatccgggtaagcctgaaacaattgagttttgtgccaaattcgttatacctgccactacccctccaatagctcctccgatcatcgagccgtataatgcctgtttatcattgattagcactccgaataaggatggttctgaaatacccataagtccagtcactccggctgacagctgtgtcccttttttcgtcgcatctttttcaagataagtgacagccaaagtggccgtagcaatcgcgatattggtaccaagcatcgcaggaataaggaatgtatcatacccttgagcagcgagagaagtaaccatgatcggaaccagcgctttgtttgttccagtaagtaccgtaaagccaaatagtgcaccaactaatcccagagccagccaaccaattttatcatgaatgaatacaaatccagcagtcatccaatttcctaaaatgactcctaaaggtcctactaacagcaacgtagcaagtgttccgactgtaatgacaattaatggaatcaagacctctttaaaatagcttggaattcttttataaataagtttatgcgtttgagccattataatcacgcccaataacaccggaagcgcggtataagaatacgtggttgcgacaatgggcagaccaaaaagactcagaccttctactccgttaattccttcatttagtaataccgcccctaaaaatatgccgtaaacaggattgatattcagttgcttcgcacttccataaccgacatagagcggaaggaaaaagaaacccgtagatgcgattgcattgatcaattcgtaggtaggtgactctgctgataaactagtcgcaagaatgataatattaagaattgcagatattagtcccacagcaaccacgattggcatcgtaggtaaaaatgcggcggctaaaaagctcagcgctctagaaaatggtccttctttacttttggtagaatcttcttctttacttttagttgtagaaatttttgactcatataattgattaaacgtatcgtagactccttggacattcgggccaaaaataatttgcagcgtatcaccctgtttgacgacacctaagaccccttcaatttgttcaaccttttctgtgtcgatctggtcgatatttctgacattcactctgagtctggttgcgcagtgtgtgatgttacgaatgttttcgatcttaataacatccagtaacgcctgagaaactgattggtaattcatatttttcctccttcatactatttgtcgaaagttacacaaacgatttctataaagaacaatttctttatactaacagcatactttcttttcatttctgtcgggggacaaaatatgcaccctgctttatacaggggacaacatttgcaccctagcccaatttccattgattataacattcccttgtcttaagattaaaataacgataaggaggtaaaaatatggcaaaagatactttttttcctgaacattttttatggggtggggctatcgccgcaaatcaatcagaaggttcttggaacaaggatgggcgcgggtcatcggtagcagatactgctccatactatgaaaatcaagattacgctaaatatgctgctttcgatgaattatcaattgaggaaatagaaaaaagattagccgataaaaaggatatttatcctaagagatggggcattcatttctatgagaggtacgaagaggatattgctttatttgctgaaatggggtttaaagcgctaaggatgtctatttcttggtcaagaatattccctaaaggtgatgaaaaagagccgaacaaagccggtttggatttttatcatcgcgtattccgaacgttaaaacagtatgatattgaaccaatcgttactctttcccactatgaaacacctgcatatcttgctacgaagtatggaggttggatcaatcgaaaaatgctgacgtttttctctcattattgtgagacagtcatatctgagttcaaagattcggtcaagtattggatggcctttaatgaaataaatgtgattgatcatagtttttatgtaggcggcgctgttccaacggactatataaaggacgaaaaaacggataaataccaagtgattcaccacctttttatggccagtgcaatggctaaaaaaatactaaaagatatttctccaaatgcacaaatgggtggcatgttagcgcgccgagaaggatacgcagcgtcctgtgatccacttgacgtcctggaatcaatcaaggacgatcagaaaaatcttttttattctgatgtcttagtgagaggttattatccaagctacataaaagccttctttaaagaaaatgatattaatcttattatggaagatacagatgagacgctgctgaaggaaaacactatcgactacctttccttcagctattacatgactgttctttctaaacataaaattgataaagatactgaactcacaacaggcaacttggtgaatggtgttaagaacccttatcttgaaagcaacgaatggggatggcagatcgatccagtcggacttcggatcacgctggaaaagctttatgatagataccaacttccactattcgtcgcagaaaacggcatcggacttcaagagcactctgatgggactaccgagattgaggatactcaaagaattgattacttacgcagtcatattaatgaaatgggaaaggctattaaaaacggtgtggatttaatcggatataccgtttggggaccgattgatattattagtatgtctacctcagagatttccaaacgctatggcttcatttatgtagatgctgacaatttcggaaatggaacgttcaaccgatataagaaaaagagcttcaattggtataaacaagtgattgcatcaaatggcgaagaaatttaatttgtaaagctttcaagttgaatcttatttgaaaaatgggagaaaaagagttaaagtgttagtttatatcaaacaattggtgaacatcggaactcaccttataagctccagaaacgacggacactcgtcaatttctggagcttttggagtctcctatactaggcaacaacctattctaagaaacaacgatgacttataaaaatcaccaacctcttgtattcatcccattcaatgaagcgtaacgatcttctcatcaaacaaatcatcaatcgtcactaatacgaggttttcgtggattttttctagttcacgcgcttgctctggatacggcgcttttgagaaaaaatagaagtaatactcatcgtatcccggtaaataggaggcatggctcattaatttttgaatttctttcaccgtcttcaattgattgcgccatttgcattcaccaatcaaaattttttgctctttcttattctccattacaatatcaaattcacgttcatcagaatcccctttttgcttcttccctcgccatgaacctgtacgtttaggaaagaagggcaattcttctaattcatctaagaaatataaatagctcatggagatttcttcaaaagcaggggcaccaatgaactcattcaatgtttcttttatctctctttgatacagcctttttcctcttccacgctcgatctcttcttgattcgtgaagacatagcgaaaccaaaaacgatagacattatcctttaaagtataatgagaatttttgctcttcaacggatcaacatcgaagggcaaattccgttgaataatccgcatattgactagtgttttaaggtacttactcaatgtacttttttcaatatatgttgcttgccgaatttgttcaagcgtgttcgccccactggcaatagcttgcagaaccgaattatataatttaggctctggcagctcctgatgcaataccatgattggatctgaatacagaccaccataaatatcgaaataaagctcctccatgttctcatcaaaggatagggtcttatctacttgagaaagatagtacggaatccctcccatgcaggaataaaatttcactttgtcttcatttgagtagctgtcaaggaattttgcggcatcaatataatctagttctcctacatgaataggcgtagtctttcgaccaaaaagtggactattttctgctaatacctcatcctccataaagctcacctgcgaaccacaaagaatcataaaaatattactatcaagatcaagtttgtggtcaataaaatgctgaagaattgaatttaaagacttattcgcctttgctgcataaggatattcatcaataatcaaaacaattttgctaccgcgtgttttttcatacagataattaaacgcatcttcccaattatcaatattaggtaaaaaatgttcccccacaagttcctgaacggcttgtaaaaatccattgatatttaaacgatcattcacttctttcgccgagaaaaagatcgttttctttccctttgcaaattctgagataagacgtgtcttcccgacccgccttctcccatagacaacggccatttcaaagctggattttttgtataatttttcgagaatagctagttctttcttcctgcctacaaacatttccctattcctccaatctcattccgtagaaatctacgtcaactgagtttgatctatctcgtttccttaagatcagtataacatgttttttacagtttattctgattagaattattctgtttatgattattctgaatggaattatatttcgcgattcatccagctagtccgaagtaatgctagctgtggaataggtactaattaatttaaatcaataaaaaggactgttttttagcaacattatatttcttacattttaaagaatttacgctcccctattactattgttccacaaggacgattttcgttcaaaatgactatgtgctgttaactaaagagtttttgattcaacgtcaccatctcaatcaagccctgcgctgcttccgctcctttattcccggctttggtcccagctctttcgatagcctgctcaatcgtttctgtggtcaatacgccaaacatcacaggaatctctgactctagaccgatatgggccaccccttttgcgacttcattactaaccagttcataatgggtggtggctccgcgaatcactgcgcctaaggtgatcaacccgctgtattttccacttgctactaatttttttgtgataaagggaatctcaaaggctcctggtacccaatagacatcaatatcttcttcctttacaccatgccgcagcaaattatccatcgctccgcttaatagtttagaggtaataaattcgttaaagcgtgcaacaacgattcctaccttgattccttggccgtcaaatgttccttcaaattgtggcattctttttctctccttttcttaaatcgataataaatgatgaaatttttgttttttcgtttttaagtacgcactattttcctttaaaggggctgtttctaatggaacccgttggtgaacgtggatgcctcgttcttctagttctttcaccttctccggattattggttaacaagcgaatctccttgataccataagaagctaatatttctgcagcaaattgatactcccgttcatcgggttcaaaaccgagctcaacattggcttcataggtatctagaccttgttcctgaagctggtaggcgcgcagcttattcttcaagccaatgcctcttccttcctgtcgcaaatagagaatcgcgccgattccttctgcttcaatcatgcgcatcgcttcatggagctgctcaccacaatcacagcgatgagatccaaagacatctccggttagacattccgaatgaagccgcaccaacaatggctgttctgagtttgaaatatcaccctttgaaagaagcaaatgctctcgctgttgtccatcctcaaacaatgttaattcaaaggacccgtattcagttggaagctgaaccgtcgtcctgccttgtaccgtcgcagtcagatagttcgctaattcctccactgtgatcattggcagctgccattcttctgctagtttttccagctgtggacggcgggccatagagccatcgtcatttaaaatctcacaaatataggccgcttcactttgattcgtcattttcgccaagtctaacgcggcttcagtatgtcctcttcgcacaagtacgcctccagctttcccaatcagagggaaaatatgccccggtttgttaaaatctgttccttttgcctggggatcggctagtgctttgattgtttgtgctcgttcaccagccgaaatcccagttgtcgttgactgatgatcgacacttacagtaaaggctgtcccgaagctgtctgtatttcttttgaccatctcagaaagctgcaatcgttgagctactttttcggagattggtgcacagatcaatcctcgagcatgttttgtcatgaagttgaccgtttcagtagtcgctagatttgcaattcctactaaatctccttctgcttcacgatcatcatcatctgctacaatcacaagttgacccttttttaactgttcaatggcggcttcgattttttctctatccatacgatgtgtcctttctttgggctttgacatattttcctaacaaatccgtttcaatattgaccaattctcctcgctgtaaacgccccaaattggtttgatccttcgagtggggaatcaggctcacagaaaacaggcgattcgtggcttctgttacggtcaggcttacaccattaattgctatcgagccttgagaaataattttaccagtcaattctcttgggtagtcaaacgttaaaatcaaggcattttctaacactcgcttttcgactaagcgggtcgttgtgtcgatgtgtccagcgacaaaatgaccttcaattcgaccattgaaggctaacgctcgttccaaatttacttcgtcagatacttttgcctttgaaaacgacgttcgctgatacgtttctggcataatttcaaccgtaaattcctgctctgattttttgacggcggtcaagcacacaccattgatcgccatactatcgccaatctgataatctgctagtagttttttagacgctcggcaggttaacagaatggtccttccacgaggaatgattcgcgtcagcttgcccttttccttaataagtcctgtaaacatctgctacactctccttccgacgattcgaatgtctgatcccaattgttcaattgatacaccgcttagtgctgttacctgctccactaagcgtgcgccggtaaaactagctgtgccattcccgccaataattttcggcgcaagataggtaaccagctcatcccaatagccgcttgctaaaaaggcatcatggatgatagctccgccttcaacataaagggattgaatgtttcttttggttaattctgtcacgacaaaagacagggaaagaacctgatttcgaatgacttcgacatgctcaggcagaggaatctcatcatccctttcggtgaaaatgagcaccggactgctgtcagcttgaaaaagtacgagttctttatgtgccaatacttccccttttcgatccaagaccactcggtaaggaggaaatttatcttcgtcagtcgtccctaaggttggattgtcaatcaaagcggtttgacttccaatcaaaatcgcttgataatgcccccgttctttgcggactcgtttcaatgcttcttctcctgttaagggtgttctttgaccagctaacgcaattttcccatctaaggtcatggcctgcttcaatgtgataaacggccgttgctgctcatgataaaaattgtaatggcgatttaaccttcgaacttcttcctctaaaacccctgtaatcacctcaagcccttgctcttctaaatactgttttccctttcctgccacgaggggattcggatcaagttgtccgatgactacccgtttgatcccactttccagaatcgcttgggtacatggcggctgcttgccatagtgatgacacggttccagcgtgacatagagtgttgaatttaatagtttttcgggagtttcacatgatgtcagcgcatttttttcagcatgaggctggccataagctaagtgcgcgcctttggcaataacctgatcatctttgacaatcactgcgccaactaaaggattcgtaaaggttttgcctttgccctttaacgcttccttgatcgcaagccgcataaatgtttcatgcatacaaattcctcctttccaaacagctatttcgctttatcgtattatttttttcaaaaaacgggaaaaataattctattctcgttacgcatagcatttttctaacctgctgaagcaggaagaaaaactgccaaaaaaaggcctcgtgtaagcacatacacgaggccgtaacagataaactcaaagaaaccataatgaaaaaaggatagaccttccccatcatacttctgataagtttttcttctcccatccagactttaactgtcggttccagactcacactggatcaaccgcaaaaatgcgggtcacggacttcaaggcacgccttgtcaccgtcggtcgggaattacaccctgccccgaagaatactattcaattcacaaaaaatactactattctttttttgagtcgtcaacagaataattttaaaataacaaaaaatatcaatcataatctctagaaaaacagatcattaaaccgttattttaaattttctccattacttgctatcacctgcttataccagtcaaatgatttcttcttgctgcgttttaacgaccactttccttggtcatcactatccacataaataaacccatagcgtttactcatttcaccagttcccgcaaaaattgacctttgcttccaagtcaactattctaagttccttagaagataccatggattatcttaagaagacagattggaatgagatttatgatctaattgaccattgtgagaacatgtatatcattatccattagtgcataatatttattccattcagaataattctattcaagattattctgaatggaattatctttagtatttcatttgattgtcgtttcctaagtgccccagctaaaactttgcaatatgaactgactttgttggggaagatcatttacttgacggaaatgtttcactataaaaatacagaaaatcgtggttcaactaccactttcgatagttgaaccacgattaatttgtttctctgatctagaattgatcaacgatttttcccaaacaatccatttagttatttcaaatacttttttccctttctcgttcctgttcctccacaattcgatgaagatggacgagtaaatagattttctcttgttttgtgatatccaagccgtattccttagagataaaaatttcaaaggctctgataatagcaacttcattggtcatttttacggctaacgtttggtacagttcttccttatcctcatcaggaaagagatttccctcatagactcgttcactgaaataatttagatgagtcaaaaagcgagaataagtaaaggtatcacggtttatttttccgcctacgattctttgaacgattttttcaaaattattcatcagcttggtaatactctgatctctctgatgggaggaggattccagcttggcgttaacaaaatgaagtccaatggctgtagcttcactatctggtagttgaatttgaagctctttgtttattaaatccactgcatacctgccgatacgatattcatttttgtggtagagcatcacatcaggataattgaagttttcacctacgtttccctccttgagacgctttacgacgaatgagatatgatcggataaagacaaatagaggtagtcttttacctctatttgatagctggtagcggcatgatcgataatctttttcaccaagtttatataggtatcatccagggtgctggctaattggacaaagttggttagcattttgttatctgttaaaataaacaccttttcgatttcatcgtcttggatttcatgaccgatcgctttgttatacccaatgccctttcccattaaaatgcattcagtccctgcttcgtctaaggctaaaacgagagaattattcatcacttttagcacctgcattggctcaccgccttatcttttctctaatctgtcagcccgtgattttgaatcacgttttgataccaataaaaactatccttaggaattcgtcttaaatcctttaaatcgtgatccgctctatttacataaataaatccataacgctttttaaagccttgatgggaacttaatatgtccatcactgaccacggacaataaccgaataattcaactccgtcttgaatcgcatcacaacaagccgcgatgtgatcgcgaagataatcaattcgatattggtcatgaatttttccatcctcagtcaacacatccgctgtccctaatccattttcagtaataatcaacggtaatcggaattgacgataatactcattcaggaccagccgtaaccccattggatcaatttgtgcaccgtattctgtagcgattaaatgttggtttttctccactcggaaatatccatacagatcaaagtcaacatctttttcccgggttccgaatgggtgcgtttcatcagctggcaaatagctagctacgagtgtccgatagtaattcagcgcaataaaatctggttttgccgctttaagaatcgttttatcttccggtagtgtaactggtgcaatgcccgccttttctaaataagtttgataatagccaggatattgtccgaagcaatacatttccaacgcataatttgttttaaaattatcattcattttcgctgcccaaatatccatcggcttgttggaagccggataggtcatcgttgatgaaactgctggtccgatgctgctgcctggaatcatttcatggcaatcattcgtcgcatgggcatgagccacaaacatgtgataatccatttgcgcccgaacacgttctcggtcctctggcttcacatcgtacatattcattcgttcgtccacgcgaatcatcaagttttgttcattattcacttgccagtgcttcactcgatcaccaaacgcttggtagcatacttgggcatatcgtctaaaagcatccacacaagctcgtgcttcccatccattatactttacagcaagcgcataaggtaaatcaaaatgatataaggtcacaaaaggaataatctcattttcaatcaagcaatcgatgaccttattatagaaggctattcctcgttcattcacttcaccgtctccatctggaataatacgcgcccatgaaagtgagaagcgatacgtttttaatcctaattctttcatcagcttgatatcttcttcataatggtgataaaaatcactcgctacttttgtgtccgcctgctgagcagaacgggtaaatgaattgtggtcagcaacagattcccctttgccgtcctcgtcccaagctccttctatttgaaaggctgaggaagaagctccccaccaaaagttttcatcgaattttttcatataattttagctccttcatactttttcgaatacatgatgtttatcagaatacaactcatctgcacttcttgggttgtttaaattgctgaattcgtcagcaaaaataataagttgctgtttgtttcaatatgattatctttggttgaaccaatcgctacataattattcgaattcgtaataattactgatgtcgttaagtcatatcccgcagcttcaatcccttgcatatcgaaggaaacgattcgctgtcctttagtcaaatgctctccaacattcgcatgcttttcaaagaatttcccatccaaattcactgtatcaattccaatatgaatcaacatctcaacaccattatctaatgttaagccgatggcgtgcatggttggataaagtacactgaccgttgcatccattggcgctacgatctcacctttgcttggatacacggcgattcctttgcccattgctccagaagcaaagacttcatctggaacgtccgctaaggaaattgtccgaccttctaccggtgaatctacgactaaatcactgtcctcaaataccaaatcatcgttaatcgcttccttcaccgcatccgtcaatgtttcctgaaccttctttgcattttcctctggaagatctttaaaccctaaaacaaccgtcataatacaagcaccgccaaacgcaattaaacatcctaacaggtagcaaacaaaggctttcgttcctgcctctgcgtatactgggatcgtcaacactccttggttagcaaacgcatttccataagagcctccccagcccatcaatgctccgcccagcgcaccgctgatcacggcataaatcattggttttttcagacgtaaattggcgccataaattgccggttcagtgattccgaacaacgcagttaccgttgctgaagctgcgactgtttttaagtttttatttttcgttttcaaaaatacccctaaagctgctccagcttgagaaaaattagctgctccagcaaaagctagtaaattttgacgcccggttttggctacatcgttgatcccgatcggaataatcgcccgatgcgcaccaaagataaccaacacacaccagattccaccaatgaaggcgcctaataagattgggctcaaccccatgatatagtagtacgcccagttcactacattaccaaaataaataccaattggaccaaaaatcattaaggttgccggcaccatcaccaataacgacaacgttggaaccatgatgacttttaatacttccggcatgatttttttgacgaagccctctacgtatgccaaaacaaaaacagcaataataatcggcacaacggacgatacataatttgcttgtgtaattccgataccgaataaagtcactggattctcaccggtcattaaatcaacaattgccggataacaaagcgtcgctcctaaaatcatggcaatgtaatcgttggttttgaaaactttcgcagctgaacgtgctaaaataatcggcataaaataaaagagtgcatcagaagctgcgtttaaaatgatgtacgtattgtatgttttaatatcgacaccatacatattcagcccaatcaatgctgcgacggctaagatcccttttaacatacctgaggctgcgattgctggaaccgttggtgtaaagattgcggctactgtatttaaaattttcgtcccaattccaatcttttcgccattatcattgttcgtttcctctaactcacccaccatcggcatcagttcatcatagatcttttcaactttattccctaagacgatttgaaactgcccgcttgcttcaacgacttggatgaccccttctaaatttgaaatgacttctttatttgctttgcttttgtcctttagcacaaagcgcaaacgagtaaaacaatgggtcaagctggaaatattttctttcccgccgacctcttctaaaattcgttgtgccacatcgtggttatccattttttaatcctccaaaaatttattttttgtgatcttcgatttcccttggccaaaggtccgcgttttttaacaaaaaaaagatcaaatatacataaataacaccatgagccatggatatcatttacgtacacttgatctcgcctgcattaccagtaacgcgtcaaacgaacgcggttattaaatttacatccacactatagcatgtgattttttcaaatgcaagcgaattcaaaataaaaattttatttgcatttttttctcattttacgttatgcttgtccttgaatttttaaatcacgaagggtgtgttcatcataaaaaaacaagaacaaaaaatattattaataatagtcgcgttattttggtttgcccaatatgtttatatcccttaccagactccttacttagcagcaatcaatgtatctacgagtttcatcggcgtgattgttggctcttacggcatttctcagttggcattgcgcctgcctgtgggtatcttggctgatttgcggccgaaccaccgtttatttatttcattgggcactttgtgtgcgggagttgcttccttatttcgcatcttttttcaaagcggcactggttttttattaggtaatgttttctcaggctttgccagtgctacttggatttctttcatggtttactaccttagtctccatgataaccaaatgcaaaccgcagcaactggaaaaattatcatgacgaataatattggcatgctgattggttttattacgagcagcctattatataatcatattggcatgacgaatatttgtttattgagtgtcttaggaggtttctctggttttgttatttcattaaaactaaaaaaaacagacacaaacattgagatagccgttaatgtaaaagagctactagctgttggcaagcagccaaaattaattctattctcttttttagctctcattcaacaaggaatccaaatgtctacaactatgtcctttacaaatcaattactcaaagaacaaggtgcgactgattttcaagttggactctcctcaatcacttacatgttatcagcagttttcttttctcgaattggttcagatatctctctaaattctcagcgcagaaaatggctaacgttcacatcgtttggactgctggcactttactgttttactgttccattggtaaatgccctgccagttttttatcttttacaactcattcccggtgtcggtactggaatcctattctcattactcacttctgaagccatggaaggcatagaactcaataaaaaatcaagcgctatgggcttctttcaggcaatctacgcgattggtatgacgctttttcctgttatagtcggtgccatcaataatgcattgaacttgaaaatcgcctactgggtattagcaggcacttcgcttgttggtggggtagttgttcttgtttattacactgttcaaaagaagaaagaaaatttcaaaagttagctccatgctaaattaaggataacaaaactttctttagaggaagcttgctctcctatttgtttttgaatatatgtgtgacataagaggattgaatagtgaaatttataatttgcatttttccgacgtaaaattttagaagaattctcgtacgcctgttattcttctaagcttgctaaagcaattagaactgccgatactcttcactaaaaaaggaacgaaacactcttaaatagtgctcgttccgattaattgtaatttttaactgtaattccatgaacccttgcttcaaaggggttaattattacttacactcctaatcgtctatctatttgacgctattcttaatgcgtgttgttacaccatttaggttataacactctgcatagtcacgaatcggacgtttgatatgatcgactacataacgttggccatcgatattatgcgccttcaagttcttgtacattttttcgatttcggcttttacttcatcgtcattgaaggtatagtgaccggcaatgtctaggatttccgcttgaagttcggcgtcattttgttccatgatttgatcgacggttaattctttttgctcaccgaccatccattttctccagcgttcgctcttgatcgcgtgttctaataaaacatcccgtgtgtttgaagcgtccttgactaaaccatattccactaattttgcttcgactgccgccagattcaagtacgcccgagtttcttccgtaccgtattgcggtgccacatttgttgcagtgattgctgaaggaatatgttctagcagtgtcacatcatctaagtaatcgccgttgtgttccttcaatccaacgccgtatttctttgccatttgggctaaatcataggcgtttttaaagttgaaggttccgacttgttcagttttacgggtcaacgttcctgtctgtccaacaatgaaggtcggcattggcaatccgcgtttttctaactcttccttcaatttaagaataaatgtttcgtaggtttctgttgaagttaagccgccattggtttcttcggttccaacttcatagccgatctctggtaaattccgcgctttacgttcttgttcacaaaattcaatcaaatccactgtccgttccaatacagtatctaatggaatgactttcccaacttcgaacggatctttggttggatcgatcatcaataaatcaaagccggcttcaatatcggcaacgtatgattttttccctaattccatcgctttttcagttggcagatggtcgttgcgttctttatcacgctgccaaggcccgccgtgatctcgacataagtagtatagattgtcatagttgatttctgccgcgacttcttccaccgctttagcaaaggtaaattgattccaaccatttacatagccgccgcccaattcatctgcatccacttgattccggctggcaataaacattacaggataatcatcatcttttgatagctccagtgtcgcttggacacagttttttgacatcggtccaattcctagtaaagtagcacttttccctgttgcctgtaaatcaagtaacccttctacgactgttttaatcggtagcttttccattccttgacatctccatttcgtgtaattaaatttgagtccatgtttcttatcacacttaaagtataaggtggaaatgcaggcgtgaatattacatttgtttgcaacaagtcaatgcatcagcgccgttacttgttgcagaatcggttggaacttgttgcaattgattagagctctctattctgtttatctgttatttttataatgatatttacactaaaaaagcaagaggatattaaactccatcttgctttatcgcttcattataaacacctttttacttcgctacttccgcctgttcagttgcatcagactttttttcctgacttttttcatcaactaaacttggtttcgtgaaatgcagaatccctgctgagattactgcaccaacgatgatggaaagtgcataccataatttaccgttcacgaccggcaggataataaatccgccatgaggaactaacgcttctacaccagtcgccatacccatggcgccgccgactgcactcccgataatgatggctggcaggacccgtttgatgtcttttgccgcaaatggaatcgcgccttctgtgataccgatcagggacatgaagaatgccgaaattcccaagtctttatcttcggcggtatattttttccgatcaacaaatgtcgagattgccattgccaatggcgggatcgcacaagcgatacgatgcgcgccatttggcccgtatacgccttcggccatcaaggctaatgtaaatgcggtcgctgttttattgatcggtccacccatatcgaccgccgtcatagcacctaagatcaagcctagaataagtgcgcttccgccttgcatttgtccaagaacttcaactaaccaatccatcgctacgccgatcggcacagagataacgtaaatatagaacatacccagtacaaaggtcgtcactaccggtacaatcaagatcggcatgattgttttgattgttgatggcaccttccaggttttacaccagcgaacaaagtaaccagcggccacacccattatcatcgcaccaaggaagcctgtcttgacttgacctgcaccgatcggattattcgccacaaaacctaagatcatccctggtactaaccctggtttacccgctaatgaattcgcgatataacctgaaagcaaaggaatcatcatcgcaaaacctgccgcacccaaatcattcaggttttgcatgaagggactggtgatttccatcccagcatcagtcgccttaccggtagctaaagcgacggctaagaagatacctccaacaacgactgatggcaacatgaaagaaaccccagtattaaaggctttttgtaagtctttaacgaactttttctcttttttcatttttttaagtctccctttttataatttttctgcttcatcaatgtacttggcaggatatttgatcatatcccctggctccactgataacgatttgccagaatcgatcttttcttcaaaacgttcgccatcttctacatcgatggccaccgccaagatcaatacgtccgcttgatcaatgtcttcttgttctaattcattttcaattcccatactgccttgtgtttctacttggacctcatgtccgcgttttttgcattctttttcaatcgcctcttgtgccatataggtatgcgcaatccctgtcggacatgctgtaactgctactattttcattttgtattcctccttaacgtatctgtgttcatttcgtataccattttttaaatttcaatggaacttaattgttcatatattttatgcttgtctgtttccttcaataatttatttctaaagtcatcatccagtaatttcttacttaattgcgagataaattttagatgcatcttgctttcgctgttttgcggcacaccgatcaaaaagaccaaacgaaccatttcttcattttctttcgcccactgaaagggttgcttcactcgtaaaaaagcaatgaaaggcttcaacaccgcttctgtttttccatgaggaatcgcgatatcataaccgatcgcggtgggtacttcatcctcccgtttcatcactgcttgaaacaaggtatctgcatcttctacgtatccgacaaactctgccgtatcaacgatgtgttggattgcttcttcttgattgtctaaatcactatctaaaaaaattaaatcagttgtaataacacctttgctgttttcctgcactttctccatcttactcactcccaagttttctaaacaacacatcatttgtcgttgcctcgcgtaattgttttaattgttcattgctatcgatgatgttataaatatcggctaaaatattccgcgtttggaaggtatcctgcttcgcgatacaaatcaaaaacaccagatcaacataatatttattccatttgaatttctttttgtttttaactagaacgatgattgtttgattgacacagattgaattgccatgagggacagctgtccctgttggaagatccgtgccgcccatctcttcacgctcctggactgtttgaataaattgctgagtcacaaacccattttcaatcaggacctcgccgacttgttcgatcagctcttccttagaagaaaaatcagtgtttacaaagacaaaatccttatcgacaaatttcatcagatgatgggctcgtacaagcttcaacacgttattttcagcctttggtaaaagatcagactgtttgattcgttcaatatcttccttggtcaaaaacggcgagaccaagatgacttgctttttcggaatatccactttgatcgtagaaataatcaagtcatactcgttaagaggcatctgttctaattctgcgaccgaagccacctcaaaagtatccaatgagggcaaaacattttttattcgattgattaacagctccgaagtcgcaatccccatttgacaaacgatcaaaattttccgattcatccgtgcccgttcaatcgcggcttgaaaatacatcgttaaaaacgcaatttcatcttcattaaagctgatacctaattcctgctcatactcacttaagaccacccaaatgacattgaaggtcaaagagaattcattcttaatttgcgaagtaaacggattttctgttttattgtttgagcgtaatcgatagatcattggtggaatgtggtttttcaattgctcttccagcttctggtcactggcaaaattgatatttaacgccgcggatactcttgaaagcagccgctcgacgatcacttcatcgacctcttcttccggtaacggttcaaaacgatttgaaatgagctgtagtgataagtaatggacatcttcattggtataagtaagctccaatcgcaaagccgccttatgcagcattcgaaccgcactttcttcaaagaaaatcgttgtttcactggcatctgttcttttcaactcttcaatatgatgccctttagcgattctgaaaaccaagataataaaaatattcaagatattctgtacgtaataatcagagatagcgttcacattttctcggatatacgtatacaaaatatttgagcaaacattgatcaagctctcaccataatacgtatcaagtaatttgatcttttcagcgaaatcttcgtcatacagttcagaattatttagtaaataacgattgaactgtaataaggctttctggatatcttcttcgcttcctattaatgacgttccatgaatatcgctgcataacttaatcctagagccaacattcagaattttcatgataaattcaaaatccttgataatagaagttttactaaccataaagctatctgataaatgattgaagctgactaccttttctttaaatagcagaatattcatgatttcgactcttcgattgaaggtattatagatatcactggcttcttttttttcctcgatcgcttcgacttctttgaaacgctttatcgcgataccaacgccacgctttttttcaagatattctcccgagctctggagataatcttcaataatccttaattcgctgtgagtggttcgttttgaaacccccagcttgcttgcaaaatactccactgtttgaaagtcgctttgctgggccaacaactccaacaattctttttgtctttttgtaagcatgatgaaaaacacttccttactatctagaataaaggccttaatctttttgatagcgttatcatgatcatggcttcattatagatgggctttttgagattgactattacatttccctgcaacaagtcgctacaacatctcgtttacttgttgcagaaaataagactaaaattttgcaattaatctgcgaatgaactcttactctataaaaagataatgatgtacttttcgtgtaaatacaaaaaaacctcccacaactccaatcattacgacgtgagtgggaagcttcttctataaaacatacttaaacaacaataatattccacacgatgccatacttatccataacggatgcatggaacggactataaaaggtttcggttggcggaagaaagacctcgccgctctctttcagctcattaaacatctcggtcgcttccttcagctcatgtggattgatcgtcaagtgcagattattgccggaaacaactggcttagccacttcatccgcaaaggtaaacggcgtgccaaaaatctccagctcaccatgcaggacgtaattactgacatcttcttccacaccatctgggacgtagtcgttgtatctaagaatattcttcttttccccagaaaaaaccctttcataaaactgcatcgcctcttcgcattgcttgtcgaataagatatagggtgtcaccatggcaaatacctcctctatacttcatttttattattatatcatgtaggaacttgcggatgtttttctaaaaataagctctatccaccaatccaaaccgtatcgtcttcaacataataaaacgtatcatccgaattttcttcgatagtgtaggcagagtctatgatttgagtgatttcctttaaagtcatcagctcagcctttaagtcctcgagcatttcttgttttgaccaaggtacaaggaaaatcccttgattccagatcaactggtcagctggctcgactttcatttctgatggtaaagtcacgacctccttcacttccgaaaacaggttatcgtaattatgtaacgaatcacgataactggcgactacctgtgatcgcataaaatcttttttgaaaatccagatttttaaatagtaaggttcaccaatttcctgtaaagcagtttcccaagaatgataaacatcgagcaatgcctgaattaataggcgcttgtaccaatttggtagagtgtactctttgagagaaaaaaacgggtggatccaaagttttgaatagttcatgtttctttcttctaaccaccctaaatcaatgtctttgttgttcattacccaatactcaacatcccttagccgacgcttccagccacggatcttttgctttttaaaatcaaattttactgtcattattcctcctattttcacgctctactgacaaatcaatactgtttgttgctttgatcattcaatttgcaataggtagctaattaaccgtccaaaaccaaacagctcgcatctcttctaaaaattctaccgataacaagtagtgttcacttcgcggaatgaccgaatcaatgccacaattaggacacaatgcggtcaaatcgggatcaccatcaatccattcgttgatacgttcatattgaaaaagcaagcagcaatagaaacaaccacataagccggatttttttaataattctttattgtagatcgagtatttataggcagcttgatagatttctttcattttttctcctttatttacgatttggtttagcatcatacttctagaattttagtttactatggatggacaggtgttgtgaatcacgttatcagactttcacttaaaaataattagtcaaattgatgtctttcatccgtcatgatatactggatatacgagatatacgaaaggtggtacttatgatggcgattcaagaaagaaaacttcgaaaaataggaaattcagttgtcgttactctctcaaaagaatttttggagagtatcggagcgagtgaatcagatattgtttacgttgatgaagagaagcttaaggaggcttttgcaaaaaaagaagtaaaggacgagcatcaaaaaaaattggaaatgatgattgcgaagtccgttcagaagcacgatgaactctataaagaactggtagatagatgacgattaactatttaagggcagaagatatttcaaaaatcaacgcatttcaaattgttaattattcaccggatgagcagttgggaatcaaagacataaatgctttagagatggccgtaaatcaacctgctcaacacgtattcggtcgtgaactttatgtaactatcgaggaaaaagcagccatcctaatgatcaatctgattaaaaaacatccttttcataatgcaaataaacgtacagcgatgatggcagtggatatttttctgcagcttaacggctattcaattcagtttgatctacaagacggaatcgatctcgttgtgtcaatcgctaccgatgaatcaagtgattttgaaaacttaaaagattctgtttcacagataatcggtgcacgaatgaccctatcttgagaagccggcatgcatttaccaataaattttaactaataagaccgatcctcagcattgagaatcggtcttttattatatggaaccaatcatacaagccccattttctccaacatataagcaatcccgtcctcatctgagctatacgtgatttcatcagccactacttttagacgctcactggcatttgacatggcgataccggttgcgactgcttcaaacattggaatatcattctcaccatcgccaaaagctaagcaatcttctttctcctgtccgatatgcgccagcaatttttcgattgcggtttttttgttgatattttttattccgatctcaccgctgtctgctccaaaggcgggaacggtgcttcgcagcatgtggaaatcaccattgtattttttgtggatggtttcatatggtatcgcatgattgacaaaggaaagcttgttaacatcttcataatcgatgcgcgatggatcttcaatcaaaagatctaaaaaccatttgatctcgtttatttttgctttcccttctactgaattttccgctaatccattcaacgtcagcttgactaaacaactccgcaaattcgcactcgcgaacaagccctgattggactcaagatagtattccacaccgtgctcttctaagaagccgataagttttcttaactccgcggaatcaaacactcgatgaagaatcacctctccgtcgacctcgcagtagcccccgccagctccgataatcccgttgataggtaaatccaggacctccgctggtatttctgcttttgaacgccccgtacataaaaagaagcgatgcccattttgatgtgcctgcttaattgcgttctcagcactagctggcacgacgccactatcattgcacagtgttccatcgatatctaaaaaaacgatcttcctcatttcatatctccattctaaaaaacctgtttataaggctctaattaagcctcatttttataatcccatacaccgcaacctgttcacttattcacaggttacctgatagttactcattataattggaaaaaatttttaattccagcgtttatcaaactttattagccatcctaaatctatcgacggaataaattcctgttttctgttcagctgatttttgtttgtaaattattaagaaaatactaagcagaacaaaaaaaggaaatttttttcgaaagattttccgtgcagaaaagcgatcaatacaatattcttctccaatgcctaaaatgaaaaatgtgtcaaagtgggcaaaattgcatttgcccctgaaaattgcacgtttttcggagtatttttttaacgcaatccccttcttatgcgattccgtctagaaaagggagcaaaaacgtgcaattttgacccccaaatgtaattttgccggttttgaccaagtttgtgtttggcctttatcgttaagtcaccggccggaacacaaaatatcgaaatatggaggaagtaaaatgatccaaaaactcggcaacaaattgcaggtacagattgattcaggggaagacaagccaaaaaaagtcagttttccaaatgtcatcgatgaaccaaccgaagaggcggttctggaattaggcgcgatcctgacagaactttcaccagcaggcagcgccctagacggcgttatcttaactagtcaatcacgatataccaaataataaggaggaaaatatacatgtttaaacttgtcacagtatttagaaccagcttaggtaaacgtcaaacctggagcctcaataatccagatccaaataaatcagcggttgaggtcaaagacttgttgcaacgtctaacgaaggtaaagctatttcataaagacggcgctgatttattcgacacagttgaaagcgcgaaatatgtcaaaattaccgagatcactattttttagagagactatttggagaaggtgcgatgctctcgcccttcttcattaaatagagaacacaggaggagaaaaaaatgaatgagcagcttttgtcgcatcaaaaactattttcgttaaaaccagaaacattagaaaagcgcatcatggaacagtaccaagaaacacagaatagcagcctgactatcaaatatattttagctttacgggtaagattcaaactaggtgcgcaggagtttgcccacattttaaaggatctcgtccgctatctgtttatgaataccaaggccactcgcaccatgaagcgatttttctattactttgaggattattttatggaatccgagtggaaacaattaaacttgagagtttttccattacgtaactttggtcaaaagaccgtgtccatcgttcgttcactaatctcaattgtccgacctgaagaaactgaaacaaccgaaacctgataagaataacctacgcagaaaaaatgagagaaaggaaatgaaaaaataacccgagatttagtcgcaacatttgggaaaagcaacggcggcacccatgactggacctacaaaggcctagacctaaatctgtcagcaccagaaatcaaagaagcttgcgaactattaacaacactagatatttttgaacaagacggcgtaaaactatttgattctgttgtcacagcaaaagtccgcatttatgaagaagaagtgctttttgatccggaacacgatcctgaaatagaacaagctaatgaaccagtcagcttttttaacgcagcaaacaaacaggaaccagccgcctttccaacagtggttcttaccgataaagtctttttagaagaacagcatgaaaatcaatcaatggagcatcacttagattccgttcaatcagcggagtaccctacaccacatacagcagaaccaacaaaagattctattgaaaaagaaggtctgttccagcggatgttcaggcgaaggagtcgaaataaggaagaccctaacgataactaaatcccgagcactttctactcaatcatgcgtaggaaaattacagctaaaaacgttaaaaatgtcaagctgtctacgaataaaaatattagaataaaagaggtgatccaatgccaaatacggaagcagccttacagtatggcttggctttgcgcggaaaaatctgttattccatgtcgaatcgtcttggagcaggtgccatggattgctccagctttgttttccgttcactgatcgcagctggccttttacctaaacataccgccatcggcaatacagaaacgctctttggattgaacgggactttacttaaggaaatcacccggcaagaagtccgacgaggggatttatgggtcgcaggtcatgaaggtgcctcgctaggatcagctggacattgcggctggttcttaggaaatatcaatggcgatgcactgcattgtacctactccaaaggctgtcaaaacatcgctgttactaaagcaattggctggatgggcgattattcaggcctaccagttcgttattttcgcgtaaatcaggcgagcattgttggtcaaagtgaaaatagcagtcaacaacgaatcctagcgattgatggctcttggggtcccgccaccactcgacgtttacaggaagtgctgaattgcgctatcaaagatggaaatatcagcggtcaaatcaaaaaccctgcaaatcagtttattccatccgttcagtatggttcaggcggctcgaacatgattcgcgcgctccaagcttatttacgtgtgcccgtagacggaaactttggtcctgtcacctgtctagcattgcaaaaaagaatgggcacaaaacgagatggcctgattagcccagtatccgattgtgtgaaggtgctgcaagataggttgaataaaggacgggtgtagatgatctaaactgggaagaaagattctcccctgcgatttttgattgcagtggttatttgcttaccttttactgatgagattgtttctctcgtaaataacatacgtaaaatgctcattattcattgctattatgcagattaatgactatgtattttctgatctatttactataaaataatagttatccaaatttgtgatggttttcatatattatagttcaaagaatgaatcgttcttttatcctatataggtcattcataaaaaaacatcgcattttaggaaaaaatttttcaaaaggacggagaacatgttaaaaaaattaagttctatcgctactattgccgttatttgcgttctatttctggcaggctgcaataacaaaaaagacaacaataaggaagttaaagtctctgaatcatcagtcactaaaaagagcagtatcagtgcgtcctcttccaaatcatcagcaagttcggtcagcaactcaagtgaatcctcacaaagctctagcagcacagaggcctcttctagcagtaccgactcatcagaaagtgcagcggttaatcaagcagctccctatgcagtggatgtcactcaattcagtagccctgctacctttaatttacggggagtaaacgttcctccttcaatcactttgcaaaacaatggcggaacgactgtaacctttgctagtcgtcaatcgaattctggagatcaatttgcggcccaagttgatacgattccaacaaaggaaatccgtgttttctctcaggacggaagcggcattcgcacagtcaaagtaaacactcaaatcaccctaacccagcatctttcaggtaccggcggacaagatcaaaacaatgtgatgtatctgatcaataataaaaatggcggattatcccttattacccctaactatgccggcaatgtagagcctgatcagatggatgtcatgctagaggcagtgcagtagattttagaaggtaagaagtcttcagcatttagactgtagataataaatacaccccccccattcgcatatgcagaagcaaaccaattgacgttttcacgctctaacaactattctttacaaaaagaaagtgagctgaaaatgaagtacgtgatctttggattagaaatcatcgccataagtctctggctgttatttggacaaaactccttgctctcggccattttcgggataattgtgatcattctcatttctcagctactgcacaaagcgtttcatgcccgataatcaaaatcagcgaattctttttccttgaaaaagtcttcgctgttttgattttgaaattttaaaaagtgatgacttccaatctcgaacgatacaaatggcctatcaatggttgttttcaaagcctttttcacagataatgatagtaggaaatgtctgttatccgttcatcttatttaaacaagatgaatggagtggttgatcagcgtacttgtgaaaggagtcgtcctatgtttcatgtcgtattgattctatttcccctcattctttgtgggattattcttccgatacttttatttgggttatcttcgattctaatcagtattttttggtggaacggcctcggcgcttctgatcaaaaataaaaaggcccggtcattgctatttatcagcttcacaattctgtctcttttgggggtcttatgtttatttccttttgtcgcgatttatacacctttaccctttagctactatccgttcttttgtaatgtgttgattgctttgatggggatcttttccattctaggaattaccagctcccgttcaatccagaacaacctggttaaacgggtggtcatcgtgctttttagcatcgtagttggcgttgttggtatcgtttttttgctacagattctctaacgtaaaaaagttttgagaaggacacatgtgtgttctctcaaaacttttttattaattcaaatcgtataattcgtgatacttttgataattcactattccaagtgtcgtggtgaagaggcgtgatttagcttctaattcgacacgaattttttcaaattccttgcctgtatgcttctttggttcgttttcttttcttctcggatcaaataactccttcataacagatttcctcctttttcataacactgagaggcggacaattgttcgactagttttcagaaaaaacgggaacttctactgttggcaatgtcttcatcatccataaaaattcaatttcatgctttttaaatgaaaacaacattcgctggtaatcacgtttcatataaaacaattgggctgttttacgttctgttagaatgatgcgcaaatgtccatgctcttgggcaaattcttctaagctgttcatcagttgatcaccaatgtgctggccctgatattctggtgctactgccacttgacggacacgtgcgataccaaagggatacagttggatcgcagctgttccgacaacctcatcgttttcgattgcgacaaaaacgtgtaaattcttttcattgtcccagtcaatttttccacctaagacttgtttacgcaatttcactgcgctagtgtgttccttgctaaataattcagccatttcgattttcatcatcaatgacctcctttttcatattaaagaattaatttttccgaggaaaaattagtgtgattttcaagccgtatatcattccactagttgttcttttggtgagtgtcattactcttttattcgtttccccaccgtataaactgcgaaaagtggaactgacatcctttttcatattaaagaattaatttttccgtggaaaaattagtgtgattttcaagccgtatatcattccactagttgttcttttggtgagtgtcattactcttttattcgtttcctcaccgtataaactgcgaaaagtggaactgacatcctttttcatattaaagaattaatttttccaaggaaaaattagtgtgattttcaagccgtatatgtttaccaattttcccaatctttatctttgggctgatcatgcgggtctttttttctagggtcttctttcggacctctaggatgctctggaccgaatggacctgggccaaagccggctctgccgaattgattacgcatttgttctctccacgaccgcttcatttgacggcgttcagcttgtgacattcgaccaaactctttcatatgaggctcgaattggagcttcatcgcttttaacgcttcaatcgcttcaaatggatcatttggaaattcaggtcgaccgccgaaatcttcgctccagccatcaatcaccttattcagtaattgatccaaagtatgtagttcttcatccgttaagccggcgaagaattcttccgagcgttcttgtggtttgtttaaattggccttctcgcggccgatctccgtgatatagatccgtttaatccgcttatcctgttcatcttcgcgacgttttatttctcctcgactttccaacttgttcaaaatttcggtgaccgaacttggacgcatatccaaaatttctgctagcaccccagaggttacaccatcctcttctgccaaaatatctaaaaccaattgctgggtgggtgcactcttctgacaattacctacaaccatcaactgacgactggcacttcctacataggatagacgtttcaataattcttttgtatactcgctcatcgtcacttatcctccctttgcttcggtacctatattttaggtacctaactttttatttgaacttagtatacttcggtacctaatcattgtcaatgaataaaaccaaaaattttttaatttttttgattatttttctataaatagtgctaaaaacctcttacatcaaggattaaccgtcaattctttttggcataaatacttcggaatcattcaaaagtagtcctgagcaataaaattagctaagcttagaagagtttctcatggcgccaatcgtaaaatagtttagctgccccaaaatgattacagtttaaaaaattacttgttttcacgatgaaataaagtgtatagtgataaaacattttatttttttggggtgtaaattatggtaaataaccgttacgaacaattgaaaaaagcggagttgggtgcgctgattagtatcgccgcctatatactagtttccgctatgaaactagtagtgggaaatctagctaattctgaagccttacgagccgatggtctgaataatttcaccgatattctcgcttccgttgctgttctgatcggcttgcggatcgcgcaaaaaccagcggatgcggatcatcgctatggacactggaaagcagaaaatgtcgctagtttagtgacttcttttattatgctgctggtaggaatgcaggtactttacagttcgattctttccgtaatcaataaaaaaactgaagcaccagatatcactgcggcaatagtcggaattatttcggctattgttatgtatggtgtctatttcttcaataaacgactttccgaagaagtcaaaagtcctggattaatggccgctgccaaggataatcgcagcgatgcatggaccagtatcgggacagccatcgcggtttttgcggcttccttcaacttgggctggctcgacagtacggccgcaatcgttgtggcattactgatcttgaaaacggctgtggatatttttaaagaaagcgtcttttcactttctgacggctttgaccaaacacaactgaatcaatacaatgaagcgattagccagatcaaacaagtgcaagcagttaaaagtatcaagggtcgcagttacggcgctaatgtctatctcgacgtcaccattaccatgaagcctgatctaacagtcaaagaaagtcatgacatcaccgatcaaattgagaaattgttgcaaaataagtttcagattttcgagaccgatatccatgttgaaccgagtgattaaacaaaagacgcttcgttccacccttacaaaccccagaggaaacgaagcgcttttatcaggaaaaatttaaaccagccgtatatttttagcactgccgcaaactaagcttgtcaatctcagtttgtatatagtttccgttaaaaagaaccttccaagtcactactcagaaggttccttgatggctattacttcgccactaagattatggttaaatttatagactaggaataaagaacgcaggtacaggtcaatcgcgatcgatagccaaataccagcgatcccaagccccaagtacttagaaagtatgatcacacccacaacccgaattccccacatgccaaatgctgtgctgtataaaggcgacttagtatcccccattccttgcaaagcgcccgtcgtaatcaaactgatcgccaatcccggctgtgcgaaggcatcaatccgcaaggcaatcacaatctgctgcaacgcttcttgatctgaagtaaacaacgaggcaaaaaatggcgcaccgaaaaatagaatcacgcccagcagtgacataaagatcacaccatatttagccgccgaatagccgtatttttttgcctgcaagtaatcccgtgccccaacagcgttccctactaaagtcgtcgctgctgtcgccagaccatatgcaggcatatatgtaaagctctcaatatttccggcaatcgaatgagccgcaaaggttttggcactgatactgacaatcaaaccaaaataaagcacctgtcccaaccgcatcactaaccgttccaaagttgctggaatcgatagattgatcagcggacgataatttctaacagtaaacaaggttgaccaatccaatggacttttagaaagctgtacccttcgataaagcagccaacaccccagcagccgggataaaaccgtaccaatcgctgttcctaaaacgcctagagcgggaataggtcctataccgaaaatcaaaatataatcaatcacgatattcccaatattaaccacgacactgacctgcataggtgatttcgtatctccggttgcccgtaaaatactgccaaaaatcgtcattagacccatgaatatcgcgccaccgcctacaacagtgaaaaaccgcagcgactcttgcaaaacagctgccgatgctcccatcacacgcaataacgagctaccaaaaaatatcgagagcataccaagcagcacactgattgcaacggttaaaagaacagattgattggtaactgtttgcgcctcgtcacttttctttgccccaattttttgagcaatcaaggctgaagccccgacacctagcgcgataaaaagggccaaatacacattcaagaccgtgttagcaatgccgactgcactcaccgccactaagccgatctttgaaatcatcagagcatcaataaatcctactgtcgtctgcaaaatattttcgatcgtcgctggaatcgccaatgctaaaattttattttctttgagtgaaggcatctaatcacctcacttatagcatcttgctgtattgatgaatcgcccgccttaaactttccaactcctgttcggtcttcccgctttccacagcatctataaaggtatgatctgcatgtgcttctagtaatatttgagaaatcttttgtatcgctgccttagcagaattcaattgaatgatcacttcgtcaaaaggcttttcatcaacgatcattttcttgatcccgccaatttgtccttcgatccgattgattcgttttacaaggttatccacctgatgatccggtctatgtgacatgtttgttcctcctcttttcctttgataaaacttgggtatattacagcactcatcatatgctatatacccccataccccatatggttattgtaaaactttcaagtaataaagtcaaaatccactgttaacagatggagggcataagaatgctaatattttaatctcgtttctccaaaaactctgaaaagtatacatgcttacctactttcggtatactattttatgcggatgttcgttcagtaatttactatggcccaacctgctgatatttttattagctatcccattgagaccttgacgacgttcgaattaaacatagaaggagactcatcctatggaaaaagagaaaccctcaaaaatcattcaattttttggtgggaaaacatcgtattacattattggactgattattttgagttccttggccatctatttattaaatactgtgtcattcatttttaaaccactggtggtcattattacaacggtgctgccgccgatgatctttgctttgctgctgtattatttactgaatccagtagtcaattttctgagtaaaaaaggtgtaccacgcaccctcggcatcgttctcacctatgtggtaattttcggaatgcttttctttggcggtgcgcggcttataccggtaatccaaaatcaagcgcaagagttgattaagcagttcccttcttatgtcgatgatttccaaaaatcgattcggaatattttggatgccacaccatttgcgacttcttctgatcaggctttggattcgttggacaagctggcaaaagaagctcttacctatctaggaaataactggcaagacggtgccaaaggtttgggaacaatcttttcagcagtttccagtaccgctattaccttgtttaccggaccgattatcgccttctttttactgcaaagtccgcataaattgtacaatgcagtaattgaactgattccgccacgtttcagaaaagattcgagcgccttgatccgaatagccaatcaacaattaggcgccttcttaaaaggacaagtcatcgcttccttgctgctaggcttgatttattggatcgtcttcctgctgttagggctggaatttgcgacagtcattgcactggctgcagggattttgagtatcatcccatatatcggatcatttttggccttcttaccaggaatgttcattgcctttcaggattcgaatctgatggtggtaaaattcgtgatcgcttggtttgttgttcagctgcttcacggggatttggttgtaccgcgggtcatgggagacaaattgaagattcatccaatcacgattctagtcgtattattggtaatgggggatctattaggattagtcggtgtaatcttcggtatcccgatctactccatgatcaaattgttcgtcgtcttcatctttcgcaagttcaagcagcgctataataagtacttcgctgatgaaggagcctatcgcaacactggcttttccgaagatgattatctataaaaaaatgagttgtctccgcaatttggagacaactcatttttgattattttttatagataaatcgaaaagaacatcagcattgcgccaagcatcacgaacaaatgccaaacaacatgcatatagcggcgattcttcatactgtaaaagaccgatccgacggtataagcaacgcctccgccaactaacagcagcaagcccttcaatccaacactatgataaagacttggcaaagcaatcacgactgcccatcccatcacattgtagatgatcgtagacaatttcgagaccgatttaactttgcttagcgtcaagcttttgtagacaatcccgacgatcgccgccaaccaaatgacacttaacaaaacaattccgatcgttcctttaatatagagcaaacaatatggcgtataggttccagcgatcaacagatagatcgaacagtgatcaaagacctgaaaaactttcttcgccttggtgaaaatcaagctgtgatacaacgttgaagctaaaaacagtagtagcagcgagacgccatagataataaatgatacataatgcagcccgctatccgccttcttcagcaaaaaaacaaacccaacaatactcaacactacccctataccatgcgtcaccgcattcaacacttcatttgtgatcagatatttccggctaaactgtgtattcatttatttgtcacctcgaataatttattaaagatactatatcatagttaacaagataattcaatctagtttacaaaactagatgatagctcatcctaaggaaatcccctgtttaaccaatttatagccaaaaaccagctcgtcctctacataaatctctgattccttggccgtattcaataccttgatcagctcattcagtgttaatacctgattttgctgtttctgtaaaataatctttgactcttctgttttgatccttaaatgattcgtctgtttatctccatccttcacaaaaacataagtatatgaagacagtttcttcagctcacccgccgcatctatctggattgcagtcaataaatctttggctttcaacgacctcacctccacttttattatagcaaaaagaaaacgatgaacccggggaaaacgctccttcggttcatcgtaatattcttagcttcgatccaagcttttagcgatggtattgcctaacgactgaacaatctgaaccagtacaatcagtaaaataatcgtggtgtacatcactgccggctcattgcgtaaaaaaccatattgataggcaatgcttcctagtcctcctgctccgactagaccggccattgcggtagctccgatcaaaccaatcatggcaatcgttaagccgcgaatgattccgcctcgcgcctctctcaacagcacactgcggataatatgaaaatgactgattcccatcgcctgataggcttcgatcaccccgccatcgacttctaaaagcgacgtctctactaaccgagccagataaggcgccgtgtagatgatcagtggcaagaggacgccctgcacaccgatagtggtacccataatcagcttagtcactggcaatatcaaaaataataaaatgataaatggcaacgagcgcaacacattaataatactgtttaaaatcgaatatagaggcaaattgctgttcaaaccgccaggacgagcaatgactagcagtacgcctaaaggtatcccgataacaattgataagcctaacgctacaaacaccatcacaagggtttgacctaatccttcgattacgacattgccccactgattccaaaattcgctcattacacaaccccctcaacgatgattccttgattttcaatatactccttcgccgcttggaaatcggcttctgttccgccgtcaaactgaacgagcagctgaccatgacgcttgtccttcaaatagccgatgttcccgctgagaatattgggacataaaggaaaatccttcgcgacctttgccaaaacaggttccgtcgcctcttctccaataaattgcagctgaaccagcctgccagttcccttataagacgctaggacctcttctgggacgttgtagccatcatttgcaccaatgaaccgtttcgtcgtttcctcttcaggacgggtaaacagatcgatcacaggacctacctcgacgacctttccttcttccatcaccgctacacgatcacagatacgctgtactacgtcgatctcatgagtgatcagaaaaatcgtgatacccagttcctgattgatcttcatcaataacgtcaaaatggattctgttgtctcaggatctaacgcactggtagcctcatctgataataatatttcaggttcatgagccaatgcgcgggcaattgccacccgctgtcgctgcccgccggacaattgggcgggataattgtcttttcgatccgttaagccaactaggtctaaatacctgtccacacgctctgcaatcacctctttgggcactccctccagcttcaagggcttggcaatattttcataaacagtcgctgtcgataacagattgtacccttgaaaaatcatcccgattttacgtctagttaacaataattcttttttgttaagctcgcccaaatcctgatcattgatcaaaatttgtcctgttgttggcggctccaaaaaattaatcatgcgaatcaatgttgattttccagcaccagaataacccaccacgccgaaaatctcgccctgttggatcgttaggctcacctcttttaccgcttcgattcgacgctttttttgttggtaaacctttgacacatttctaagttcgatcatgtgaagctccctttctcattcatctatctggtattactaaaaagctggaaccacagagcctttgaatttttcctcaataaattcctttgttttgtctgattggtaatatttcttaatctctttaacgatcttgtcatctttgttttctgtgcgaactgcgaagacattgtaattagggttatcctttaatggctcgtggtagattgcatcatcattaatggtcaatcccgcaccaaaggcaaaattggtattgattgctgctgccgccagctcgcctagctgagacggaatctgtgaagcctctaactcaacgatctcaatatccttagggttttccgcaatatcatttttggtcgctttaatttccacgccctctttcagcttcagaacaccagcttcttccaatagcttcaacgcccgatactcattcgtcgggtcattcggtacaccaactttgtcccccttttgaagtttacttaaattcgaaacttttttagagtaaacccctaatgggaaagccactgttttaaaggcggattcaattttatagtccttatccttcacctgctgctcaagaaaagagaacgtctgatagctatttccatccaaatccccatcgtttaatgcagtatttggcgtattataatcgtcgaagctttttactgtgatatcaagtccgtcttttttcgcttgcttagcaacctcttctaaaatctcctgatgaggacccgacgtcacaccaatcgttactttcttttcatccaacggctgcgcctcactttttgttccacagcctgccaagattccgctaactgccaatgccgctacacttaataaaattccttttcctaattttttcatcatcatttcctccatattcgttttaaagtataatttttttgccaaagaaaaaagcccgccctcttccacacattatgtgttggaaaaggacgagctaactcgcgataccaccttcatttgcaaaagcctcacgactcttgcctcaacaagtacaagcatacttgagcgttggtaacgagcgctgccccgtcattgcctacttatcggcaatgccattcagagaccattttctaaattcttccgcatatccgctctcacctgcccggactctctttgatgcttcgtcatttatacttttctcttcatcacgtttctttgtttagcaaattgttaaatcgtatcttacaggttaaaataaaacctgtcaacactttttatcattaaaaacacagttgactttaattttaacaaagcataaactagttgaaatctcacaaaacgaatagataccatgtttcatttaatcatcttggtattcgtttaaaatggagcaagtcttccactgacggcttgttcttcaatataaaaaggagttgaattcaatggacatcactaccgaagtacgccctggcgccaatcgctatgccagcggtgcaaatatcctgcaaaatttacccagctatttagctgacttcaagaaaatctcggttatcaccggcgagaaatcctctgaagcattcaaaaaatactatcgcaaggaactacattacccaacatatcgttacgatggcagttcaagccacgaaaacgcagtggaattagccactcagattggacatgccgagttgattcttgcaatcggtggcggacgtgtcattgatacagcaaaaatggttgctgaagagctgaacgccgagttaatggtgattcctacattgatctctaattgtgctccatttactccaattgtcgcagtctatcatccgaatcggacatttaaagcgatgggatttatgaaacgcgcacccttcttaacactcgtagattcaaacttcctattagcaacaccaaaagattactttgttgccggtatcggtgatacactagcaaaatggtatgaaattgaaggaattacaagaaatctagctgaagatgaaaaatccgcttatgtgcgacttgggatcgccagtgcgaaagccattcagcagcttcttttagaagatgccattcctgctatcaaagaccttgaaaatcaccaagcaacctctgccttcagtcgtgttaccgatacaatcattggtttagctggagaaacaggcgggtttgctgcatcctatggccgctctgggggagctcatgctgtccatgatggtctatcttatttagaagcaactcataatcagcttcatggcatgaaagtcgcctatggtattttggtccaactagcacacacaaaagacctagaagaaatcgaaaagcttagacccttttataaaaaaatcgggttgcctttaaaactgaaagatctggaagtcttcgacacatcaaagagcgctttaacaccagtaatcgaacatgccgcctcgtcaaatgaaacctttaatatggttgatcctcatatcaccgcggatcaaatctatcgagcgattcaaacgatagaatttttataaagtttacttttaagccattgaggtatacctcaatggcttattttatttaagtttaccttttatcattcccaatatatagtttactttaaatacaataaatttttatctattaatagagttcacctctaataacgctgttaattaagcattttatttaaagtttaccttttaatattttaaataaaggtttactctaatatcattatactagatgaatttctttaatttaaagtttactttatcaaatagattattttatttttaagtttaccttaaatatcctactgaaatatgcctctcatcgctgtttcaattaccactgtttctaagtagttattttaatctcgattccttttatataatagataaaattcacagtttacttcaatttattttaaatgaagtaaaccctattaagtattgaggtttactctaattaaataaggtttactttaaacttatattatacagttcaccttaaacattcgatttaaagttgactttttatttataggtaaacttcaatttagaatatttaagtaaactttcttattcaaaaaagtttacttaatttcatatagaaaaagtttacctcataacattgataattttagagtttacttttataagaacaaatagtttaccttaatcgtgataaatgcagtttacttttatttaaaacggtttactttattaagggtagaaaatatatagagtttacttttaaataatcattggtttacctatattctttttaaagtagacttttttaaaagacaaatgttgaaattaaaggatattactatagataaagtttactttttattaaattcaagtatactcttatatagaaaagcgttaactcaaataaccaattgaggtaaactatatatcagatgaagtttacctcaatttatacaatggagtatactttatttcttaattaaagtttactctattctatgcaattacagtaaactttatctccatagcaaattatagtttacctcatttaatgaattatagtaaaccttattgatattattatcgttttatagtaaactttaaattgagaaattacgattggagaattagtatgccaaaaaaagctgagacatatgtagtagggaattttaaagggggcgtaggcaaatcgacgaccgttcaaatgctttccttcgagagtgcttttcggaaagatcgtaagacattagttattgatttggaccctcaagggaatacaagtgacgtattgtcgctaactgctgaaaattttggcaatgataccttgcctgacgaatttgatgcaaccatttgggaggctgttcgttctggtgatattcagtcctcaatttaccagatcattccgaatttggatctgatcccggcgaatatttcattttctgattttcctgattatatgattgagaaatatcctggcgataaattgtctcaatttaaatacatggaggaattgatcgaaccacttaagagtatttatgatgtcatctatattgatgttcctccgacaatcagcacttattcaaatgccgccatgtatgtagcagaatatgttatcgtcattttgcaaacacaggtgaaatcactcaaaggagcgcaaaattacattgattacatgaatttcttcattgaacagtacgaaacagatcttgaagtcgtagggattgttccatttatgatgcaaaagcgggactccgttgaccaagagatctatactgcagcaagagaaatctacggtgcgcatcttttagatacggttgtgttaaatcaaagccgtttgaaacgctacgatgggtccggaataacctatgaaatcaacaaaaacggtaaagttgagcaatgggacaagcgcgcacacgaggttttcgtcaatattttggacgaaattgatgaacatcgcctcatattgagcggtgaagagtaggggagacgttaaatggcgaaaaaaatgaagctagattcgcttttaacggcgaataaaaagaataaaggcattgaaaaaatgtctgagtattccaatcaagataaagaagagaagaaacctagctctcaagacctcttagcaaaacgcacgctaagcccagaaacagattttcgtcgttcttcatttcacgatgaatcgagacaattaaatgagagaaatcaaattcagcaacatcctcctcaaccccaagaatcagaagcagggaagagaggtcggaaacgtcaatattacgatccacgtttaaaagctttagaaatgcaaaaaatctctgcccgaactaagattcgcatgcaaaatttaatcaatgcaaagtttgatgggtatacaccagataaaatgattgacttcttatacgactattatcttgaaaaaggtctttcaagagatgatcgaagtttcttaaatcaacttgaagaagcctcgatggaagagtataaagagaagccaaagtaccaaaaattattcaaagaattagaaaatgatgagaaatagacacaaaaaaagtaaaccgtaatgtagagttcatcttgcattacggtttacttttttaaaagttatctgttatttaagtttacctttattattgtttattattttttaaagtttactttttcctaaagacgagctttctctatgtaagctgtggataactaaagaagtccttatccacattactttttatccacattacaactcgaacagggggaagacaatacttaatttaaggtttactataaatacttttatatcctttaataaagtaaaccaaaattgtttttatctctatattatagtaaaccttaatttgttttataaacataataaaagtttactctaaaaaaagatggtagggaatcgctttacaacaggcttttaatccattattctatacatgtagaaaaaaacgaaaaaaagagtttaaagatttggcgatctttaaactcaaaggtttgagctaattttggcgaattagcctgtcacatttagataaacgtttaagggttagaaaaattggcgtttgcctaaccttctattaagtataccatattttggatactttctcaatcaaatatcttgtgacagtaagcattcctttaaaactttcgtaaataattttgagagtgaacaaggaggttttttgtcgtgtccacaaatttagaaaatatcatgacagcaacaaacttacccaatggaaattatattccgattgatatgaatttaattaataatccacaatatgaaaagctttctattgaagcaatgatgctccatgccctttacacaatgcgcatgacttgcagtatttacaattcccaaaaagacggaagctggctagatgaagcagggattccttatatctatttttcaaacgaagaagcggcagctttgttacgtgtgtctgaacgaaaaataacaactttgaaaaatgtattgataaaagcgggcttaattcaggttctgcgtcatgggttaaagaactatcgtatctatgtttctaatcctaaagcccctgaaaagggaatggttgttcaattgtcttttaaaaattatatgagcacaaaaaccttaactcctgtggaaaactcagttcccgaaaaaaaagccgagttatccactgtggatagacaagcagaatctgcgtctaggagctcgcaagatttgcttacaagtacacaaaaacatttagcaaaacaaaccacaaatgcaacaaaagtaaccagcaagtcgccgcaaaacacagctacttcgcaggatcaaagtttaatcgaaggcctgaatgctcgttacgctcatttattaccacagcaagcttttcaacgatttctaccattttgcgagggaaattatcaaaaggcacgttggtttgttgatactattttcaaagctaaatatgccagcacacagcaatatatccaagcaggattaccagcagaagctgaagtattaacctttgaacacaacgaatatttcaaggctgacattggggatgcaattgctaaggctatcgaacaaatgtatcgttataaaacggttaaaaatccagaagggttcttttttgccttcatgaagggcttctttaccgagaaaactcgacaatacttaattgatcattacgagctaaccgctgatcttaaacaaacgctttcatcggttcaattaattattcagcaaaaaaatctgcggcaaaagcttgaaaaaacgcaaaaagtctctaaaaaggtctcctaagaacgaaaacctttgatataatgtagcggagtctatcagtatagaaaggttaattttatgaataagtttaaactagcactttttggttatagtgggcttttaggattagctgtaggagtcattatagctttatttatggggctggcagaggtaggtcatcaacttttatggcagacactgcctaaagcgctgggtgatccgcgcttttatcctttgattctttgtacgattggtggggtagctattggtttttttgttaaaacgtttggacggtacccccgaaccttgcaagaatcttttgatgagtttcaagaaacacagcgagtcgattatcacgatggaaagctgattcgaaatttactaggcgctttgatcgtgttgctatttggcgcaagcttagggcctgaagcggctctggtagcaatcattggtggtctcgtcacgtatatggctgatcggaggaagctctccgctgaccagcgaaccgatatgatcgagtttagcatcgggacatccatgggtgttatctttatgacaccattgttcggtgtgggacgttcggtggaacgtgataattggcaagtggtgacggaaagtaaacttaaaaaatacgttttatacatttttacgacgtttacaggtttcattggttatcttttagcgtacaatctctttcctaaccaagagcaagtgtttgcgattcgcagaatggagagcagttttacttggcaaggtttgctgctggttattcccatgattattttaggcgcgctttttgggaaatttttcttagttttacaagaaaagggcgataagctgaatcagcggatcaaaaatccactgccgttagctattttagcgggagtacttctaggattattgggaacgatctctccatactttttattttccggcgagcatagtctcttgtcttttactcgtcaggcagaaacgatgagttttttcattctgctattaatcggatttggtaaggtagcgattacgatgatttgtctggcctgcaactggcgtggcggaacaatctttccgatgatttttggaagtatcgccgttgcattggcttttgcgaatctatcgccgtactcacctggcttattggtagctgtttttacagctagcgcttgtgcagtaatcttgaagcagccatttgctacagcctgtttatttttattactgtttccagtggaattatttttgtggatctggttagcgggatatctgggcaacttgtttttacaacgaattccctttttccacgaagagcaaacaattaaatcctttaaatttcctgaattgccgaagcgaactaaaaaaccttcagtaaaaacagaagaaaagagcgctacacgagatgtttcagaattaagaaaagcagcagatcgtaaaaaggctgaaaattcagatgtgcagccgcgtgttgccaaaccaaagcaagaaattttaacccgaaaagaagctcgtccgtcacgtgaaccaaaacgaacggttgaaaccaaaacagatagaccctcatctgatgcaccaatgactcggatgagtcgccatcgacgtaaataaaaagcagcagaaattctcaatagaaaatttctgctgctttttggttgttccattttattaaggttcaataatattgaagtaacgttcgtcaggatttatttcaaatagctgacgccattcttttagttcctctgttttcgtatagagaagctgattcataaaaggtattctgtttccacgataaagatattctggtgaagctaaattggttgaattaattggaaagtaagttaagattcctcgccaataatcaagttggtaacaagagcttcgttgtttgtatgcgccattttcaaaagtccaatcatcttcaaaaacaactataccagaaagctgtttgtcgctagggatagtgagtaaacttaaataattgagcaccatttccccagtgagatgactgatcagatcctgagatccattggcataatgatcgggatttttgattgttccctgcgcgagctccagagcaccagttaagtattcattacgccaagtacctgactctgcctgataccccaattgggtgagagccttattgcaaagaaggcgcgcatcctgattgtctggttctgcgaaaacgatcagattggttactttagctacccagcgatagttaccgttttgatagtcttcagcggctttttgtaaaattttctgtgcgccacccatataattgatgaaatttttagcttcttcaatcggcggcagcgggtccaaattaactggattcgaatcataccagcccatatatttttgatagacggctttgctattatgactcagtgttccgtagtaaggtcttaagtaccatttttccgttaattcttttggcagcctaatctgactttcaagttcgttaatggtgtatcctttattgatagcggataacgtctggtcatggatacctttatataatcgagcttgagagattaagtaatctttaattgcgtcggggtcttcggctgttgcatatcgcggccaagtgtgagcatgaaacattacccgagcttgttctccaaataattgctgggcttctagaagatattttgcccaagctgtcgcatcacgaacctgagctcctcgtagtgtatataaattatgcatggtacaggtacagttttctgccatccacaatgctttatactgaggaaaatatgtgttcatttcggcgggagcttctgtaccgggagttaattgaaaaaccatttctaatccatctatttccagcgtttgattttcagtaatctcttttgtcggcagctcaaaactaaccgttcctaaagactgtccttgaccgatcccgattgacagtgagccagtgggggaattttctagcagggtgccatattggtagcctgctcttcgtcccatggctttgccggccatcaaattttcagcaatcgcggcttcagtaaaacctgttggagcaaaaataggtatctctggctctaacgtgaaatcaggaaacaacccgcgaattccgccaaaatgatccacatgagagtggctgataacaattcctgcaatgtgtccgtcaacaattggatagtcattttcttcaaaccagtgattagcaaattcaatcgctgctcgggaacattcaatactcatcaaggtgtcaaaaatcacccaagtattttgcggagtcaaaatcagactcaagttcgccatatcaaagccgcgaagttgaaaaatcttatccgttacacgaaataatcctgtctgatgattacagcgggcattttcccatagactgggatttgcggaagtagggcagtccttctccaaaaaatcataagctttttgactccaaatcactttgttttcttggataatttcaagtttgttaaacgaggcaacacagttttgtctggcaaggttcaactcgtgattatgattgaaaggcaagctggatttcacatgttgattatgctgacaggtatgatgactagctttttccataagtacctccttttaaaaatgtgataaaccaatggtaagcgatttcgcgataaactgtcaaactagagctgatggtcagaaagacttagaggaatgaaccgctagaatggttatttatggttgttgctgagagtatatttttttgaaagcgttgaccaaagttcctgcgactgctactctattctttagaaggctagaacttcaaaacagaaaggaacgtgtgacaatgttaaacgaagcaaagattcgtgcgtatttggaaaaagagaaattggacgctttttttattgctaaaagagtaaatgttcgttttactagcggctggacaggagacgattcatttattttgctcacacaagagggacaatactttttgactgatccgcgttataccgaacaagcggatattgaagtaccagattatgaaatcattaattggcgtttgcccggacggactgtcggggacacagtggcacgcttagcaagtgagaaaaacataaagacgatcgcttttgaagcagattatctgacctatgatatgtattctgatttcacctcgaagaccaaagcggaatttgttcaagagggtggtgtaattgaccgcatgcgtgccattaaatcaccaaaagaaattcagtacatgcgcaacgcttgcgaaatttcatgtcgtgcacttaatcggctattaccggaaattcgcattggggtaacagaaaaagaattagcagctaagctttctttatacatggtacaagagggtgcagatacgcagccatatggaaatattttaatttctggcgcaaatacctctttgttacatggcattccatcgaaaaaatcaattgaatatggtgattttgtcttaatggattttggctgtcaatacgaaggttatatgtctgatatgacacgtacggtcgttgtcggaaaggcgtcagaaaaacaacgagaagtgtatgagcttgaaaaacaaagtctagaagcagcagaagcagttatgaaaaatggcgccgcagtgaaagacatctatcaagcatcattgaaaccattggcgggaacagaatatccgcaatatacgtatcggaatattggtcatagtatcgggttatttgttcacgaattaccatacattgacgaacaatatgatgatgtattggaaacgggtatggtcatgaccattgaacctggaatctatattccggattggggtggtgtccgaattgaggaccaagtcttgatcacggatgacggctatgaaaatatgatcagtatttctcatgatttgattgaattataagattgagataggctatactaagacgacgacggcagaggctgtcgtcgttttttaaacaagtaatcacgttaaactattgatgaaaaaaacgtatgatttggcagattatttacgtaaaaaagggagtgaaaccgatgaatgaacaggaagcttttgatttcgtctatgatattggggaaacactattaaagaatggtgcggagatcaagcggattgagacgaccatacgccatattgcggaagctctggatttgaaggaatttgatagttttgttttaatcaatgggatttttatgacagctcggctgaaggatcaaacagtccaggctcgtgtacgggatattccgatttctccaattaatttggggcggattgaacagatcaacaccttatcgcgtcgcttaacagaaaaacgtttgagcccagaggatgccaatgagtggctgcaggagattaaaaatgagtcctttgcttcaaatccattaaaaatttttgcctatgcttttggcagtgccagcttctgttttatttttggaggaagtctttgggataccatcggtgcattcattttaggtgtgctattagcctgcttttctatgtacttattaccgaaatttaatatgtcggatattatttcaacaattaccagtagcggctttgtcagtattttagcttgcttgtttgttcatttttttccggtactgcagctgactagtctagttactggtggaatcatttcattgctacctggtgtggcggttgttaatggtatacgttatttatttgatggcgactacagctctggctgggggcagatgatcaatgctctgattaccgctctttgtgtttctgtgggagttggacttgtcttgcaattatttagctaatttatttgaaaattgaaaggagtgaaagcaatcatggtaactactttgcttcaaatcctagctgggtttttaggaacaatctcatttgcgatactttttgaggttccccgttgctattatgttcactgcggagtaatcggcgcttgcggttgggccatctatttgctgatcatgcatttttgggttgcaccagttgctgcgacatttattgcttcaatggcattgatttatctttcacgagaagcgtcctttgctttaaaagcaccggtgacaatttttttgatttgtggtattttttgccttgttcccggaatgggaatttacaattttacttataattttttcatcggtgattccatcaaagccgcacaaattggtgttcaagttttgaagatcgctatcgcaattgctgtagggatcacagtgggttatgagttatcacctaaatttttctattcctatcataaaatgcaaaagaataaaaattcactctcgtgaataaaatgtagaaacaattttgttgtataacagaattgttttttattttatttccattcgaaaaaacaaactaattgttttagaaagtgttattgaaaatcccattattttaatagaaaaacaaaaccatgagagaaagataaggagcagaaataactggagaaataatagattttgggacaatttttttgataattattccaatcaaatggcgatttagaaaaaaactttaaagaattgtttaaataagccgaaagatatagtaaactagtggaagcggatacctataattttagttgattttattctgtgaaagacttgaaattcaaatgattttatggttattttaaaactagtgataggtgaatagctgcacaatttttttgtgttgttttcgaactgttgcatagcagttagtttccgcgaaaaggattattaacagctacgtgaaaacagagctgtttttaataatgccgccaggctaagaatatcaatagaaggagtgaaacattttgaaagaacgtcgcgttgaaagagtaattgagaaaatgaaagaacaaggttatggccaactgctagtttcagatccaacaactattttctatctaactggtcgctggattcatcctggtgaacggttgttagtattagtaattactccagaaaataaaaacacattgatcgttaacaaattattcccaatcgaagaagacttgggcgtggaaaaagtatttattgatgataccgacgacgctgtgaaaaaagtacttgagtatgttgatactgacaaaaaaattggtgtagataagaattggcctgcgcatttcttattacacttattagagcttgtacctaatgctaaattaggcaatggttcggaagtcactgacgcggtccgtgcgatcaaagacgaagaagaaaaacaattaatgcgtgatgcgcaagcagataatgagatcgcgattgatcgtttgaaaaaattattgccacaagaactaacagaagctgaaatggctgaaaaattaggcgagatctacaaagagttaggcaataccggcttctcatttgatccaatcgtaggttatggcgcaaatgcggcagaccctcaccatgaaacggatgattcaaaagttaaaccgggtgattcagtcatcttagacatcggcggaatcaaaaactcttatgcttccgacatgacacggacattcttctataaagaagtatcagataaaggtcgtgaagtgtatgaaatcgttaaagaagctgcccaacgtgcgattgatcttgtgaagccaggggttaaattttctgaacttgatgctgctgctcgtgattacatcacggaaaaaggttacggagaatactttactcaccgtcttggccattttatcgggatcgattgtcatgaaacaggggacgtttcaggagcaaatgatgctgtcgcagaagtaggcaatgtcttctcgattgaaccaggaatttacattccaggcgaagtcggtgtacggatcgaagatttagtaatcgtgacagaagatggctgcgaaaacttgaaccattatccgaaagacttagaagtaatcggttaggaggccgcgcaacgtatgaaaatcgaagaaggatatatgccttatctagggcatcaaacttattatcgagttgttggagaacaaagcgggaataagaaaccattgattgtcatgcacggcggacctggatcaacccataactattttgaagttcttgatgaaatggcggtcgatggccgccagatcatcatgtatgatcaactaggttgcgggaaatctgcggtaccttcacagccggaactttggacggcggaaacatgggtcaatgagttgattgctttgagagagcatctaggtttggacgaagttcatttactaggccaatcttggggcggaatgttagaaatcatttatgtttgtgattatgcaccaaaaggcatcaagagtatggtactttctagtacattgccttctgccaaactttgggcgcaagaacaacatcggatgatcaaatttatgtcagaagaagatcaagcagccattgcaaaagcagaagaaaccggcgtttacgacgatccagcttatctggcggcaaatgatcgcttcatggtacgccatgcggctccagtatttactaaggatgatcctgaaccattgtggcgtgaaaaagtagctggtactgaaagctatgtcacggcttgggggccaaatgaatactcgccggaaggtactttacaagggtatgattataccgaaaagctgcgtgatgtcactatcccgacacttgttacaagtggcacaaatgatttgtgtacacctttagtagcaaaaaccatgtatgatgcgattccaggcgcaaaatgggagctgtttgctaatagcagacacatgccatttgtagaagaacgtgaaaaatatatgaagttgttggaagaatggctcgcagcgaacgattaattttttaaagagagaaggaatgatagtggaaacaactccagtaaaaacaaagaaaccttttgggttttatgtctgtgcattagggttctcgtttgaacgatgcgcattttatacggtaaaatatatgttggcgatctggattgcggttaatgtgggctctggaggtcttggactttcaactgcaaaagctgcatcagtatcagctgctttcgttgcaatgacttacattactccaatttttggtggttggttagccgattattggttaagtccacgcctttgtgtggctgccggaatgattttgatgggtgtaggttatctatttacttggcaggcagattccctgactatggtttggataatgattatcttagtatcgattggtactggattattcaaaggtaatttatccggggtaaacgggttgctctttgatgatgaaaaagcactgaatgaagctttctctgttcaatactcattcgtaaacattggttcattcattggaacgactttcttagtattgttaattcccacatttggctataattttgttttcttaatttgtggtattttactattggttgatgcactatggtttattttcaatagccgttcattaggtgatgcaggaaaaaaaccatttaaaattgaccaacgtaaatttgaatctgccggtaaaaaggaagaaggcgcggatgcaaaattaacttcgggggataaaaaacgtatcctagcgattatcttagttacaattttttctattgtattctggacagtttggtatttagcttatatgccagcttactattactttggatatggtgatggcgcaggcttcttagaacgagcaaactggctagtaggtagctttaaagttccaacttcttattttgactcaatgaatgcattaacttgtatcattttaggcccactattaggtcgtttgtggactaaaatggctgcccgtcctaaaggtgatatgagtatgtttaaaaagacagcattgggtatgattctagtaggtgtctcttatgttgcgatggttttagcagatatcatcggtaaaggacaaacatcaattttatggttggtattagtaagtctgttgatgtctgtgggtgaaatgatcttctctccactaggcaactcatttatcgcgaagttagcaccagctaaagtaatgggcctattattaggactatggccaatcgcggtattctttgcgactatgatttaccctaaaatttatgcaattttagaaacaagtgatccttctcgattccagatgggctatggtattttagccgcagttgttatcgtgttaggtttagcgttatggtttggaagtaaaactcttgatcgattagaacaagatgattaatcaatttttagcacttgcctcaatctggcaagtgctttttttgtctttaataaaatagtttgaaccgtgccaattatgagattgttaaagagaataatcaagattctttaatgtgaacctatatacatatgaatggagaagatttattttgttggaagggataaaaatagtcctaaaacttcatttaagttgctgacaaggctaaataaaataacgaatataattaattagtgtaaatgtgaaataacgattgaggtttcttaatattcaaatacataacttgtgttgtcgacaatccacaatcgttaaaaatattattgaatcagtctttgtaaacgatttttgaggaattgatatttttgatgaaaatttaattagagaatccaaaaaaatctacaatttgtcaagttgtttatcagaaaatatcaaaataatcgagaaacgaccttttacaagggagatgagtgtgctatgatttacttgaactacgggtggctgatttgctcaagttcgaacaaacaaagaagcaaggaggtgaaataatttgacacaaattcttataccattaaaacaacatgtcggcgctccttgtaaagggatcgtacaggctggtgatcaggtccaacgaggacaattaatcgctgagcctaatggtttaggtgccaatattcatgccagcttttctgggaaagtagtggatgtagatggtgaaaatatcgttctgacgattgacgaggaacaagatttttcaacatttgttcccattcctgaaacggattctcatgcaaaggcagtggaagctgcgggaatcgtcggtgcaggaggtgcgggttttccaacattcttgaaactggcttgcgagattccagaaggtctttttattgcgaacggtgcagaatgtgaggcgttattagctcataatgtcaaacaaatgagtgaacatatcgagcaactgatccgcggaatgaaatactgcatggaaatgacgaaggcgccaaaaggtgtaattgctgtaaaaggtaaacaccggatgctggtcacacgcttgctgaaggcagtggacaatgaaccaacactggatgtttatcaattgccagacatctatccagcaggggacgagcgtatgatcgttcgtgaagtaatggacattgttttggaaccaggtcaacttcctacagaggttggtgctgtgatcgacaatgtggaaacgattaaacgtatcgcagaagcaattgaagaccgcaaaccgttcattgacaaagacgtgaccgtttcgggtcgtgtaaaacaaaaagaaacagttttcgtagatgtacctattggcacaccagttaaaacattgattaacaatgttggcggatatgtcgaacctcatggcgagatcgtaattggcggaccaatgacaggaagaagtggtgacgagatgacaccgatcactaagacaagtggtggtgtgttagtcgctatgcctttccctcaagaaagtcggaaagtcggtcttttgatttgcgaatgcggcggctctgccgaacgcatgaccgagatcgctaataacatgggcgctgaagttgtcgctgcagaacgctgcaagcgaatggtagaagtaaatggaagatatagatgtgccctgccaggtatttgtccaggccaagctgcaactgtgatgtccttgaagaagcaaggagcagaagtagtattgactggatcctgttccgattgaacgaacaccgttatgggtgtagctcctaggttaggagttccggtttatcatcatacagatcatgtactgcgggcagatgggcatagactatatcgtcgattacctacaaattaattttaaaaatttaggaggatttaacgaatgtctattacagcagaaactgctaaagaacatgccaaagaccctgcagtattatgttgccgtgcagaagcaggcaaagtaatcgcaccagatgatttagaagatccagcgatcttccctgatttagaggattcaggtttattagaaatgcctgaaaatactctaacaatcgaacaagtacttggcacgacattgaaagaaacaacggatgcgttggttccattgacaaaagaattattagatggtgtttctgaggacactgaagaagcagcagaagaggaagctcctgtcgaagaagcacctactccagttgctcctattgctcccatggcaccagtttcgccagtgggcggacaaacaattaaaatccatattgctgaaggacgcggtattgatttagaagtaccgatggctattgcaggtcaaatgggtgtagctccagcagccccagtgcctccagttgcagcaacggctcaagcgccagaagcgccagttgcagaagcttcaacagctccagaagcaaaagtagaagaaaaagtcgttcgttctgttcgtcgcgatcacatgaagattgaaaaagttgtgtttggcgatgaaacgaaaatcgaaggtacgacattagttttacgtaaaatggaagatatgtgtgcggaagcggcagaactagaagaactagttgaaagtgttacttttgaaatcattacaccagataaatacaacgaatatagtgaaacgatcatggacgtacaacctatcgctgctaaaatggatggcgcggatatcggccatggtgttacacgtgtgttagatggcgtcgtgatggttcttacaggaacagatgcaaatggtgttcaaatcggtgaattcggttcatctgaaggtgaattagaccgcaacatcatgtggggacgtcctggtgcaccggacaaaggcgaaatcttcatcaaaacacaagtaacaattaaagaaggcgcgaatatggaacgtcctggaccattagccgctcataaagcatctgactacattacacaagaaattcgcgaagcagtgaaaaaagcagacgaatctctagttgtagaacatgatgaaatcgtacaaaaacgccggattggtaacaaacgcgtgatcatcgttaaagagatcatgggtcaaggtgcgatgcacgataacttgatcatgccgatcgaaccagttggaacattaggtgcgaaacctaacgttgaccttggaaacttaccagtcattttagcgccaactgaagtattagacggcggaatccatgcattaacatgtattggaccagcatcaaaagaaacttctcgtcactactggagagaaccattagtacgtgaagcaatggaagacgaagaaatcgatttagtcggtgttatgtttgtaggttctccgcaagcgaatactgaaaaatactatgtttctaaacgtttaggtatgacaattgaagcgatggatgttgatggcgcaattgttacaactgaaggatttggtaataaccatatcgactttgcttcacatatcgaagaaattggtaaacgcggcattaaagttgtcggagactcttattcagctgtacagggtgcgttagttgtcggtaacccagagatgatcgctatggttgacaacaacaaatcaatgcaagggatcgaaaatgagatcttgtcgaacaataccctatgtaaagaagatgcaattcgtgatctagcaatgttgaagaccttgatgggcggcggcacgatcaaagctgctgaacgtaaatggaatccaaacgtgaaagccaacaacatcgagatcatcgaaaaaacaacaggcaagaaaattgacctagtagataacgaacaagtcttacctaagagtaaaaaacgccaagaaatttacgaagtagaataaggtgaagtaatggatggaatgaataaactcaaatatatttcgacggaacagatgtttgaaggcatcatcgttgaacttcacgatgccagtgtgacaatcgacttaaaaggtcgtttaggtcaacttaaaatcccccgtcgaatgatcatttctgagtataatttagagatcggtcaagaagttgggtttctaatgagctatccagaagttttggcggaagagccagacgaacattataaaactgctatttatgagcatgaacgtcgtcgggccgaagccagaagaaaacgtgaagaagcaggagaggagaattaacacatgggcttaacagtctttgaagggttacagtcagaaatttttgtgccgattacgccaaaatctgtctttacccctgtgaaaaaagagcttaaagaaatgcgcgtggcgttagcaacagcagctggcgtacacttaaaatcagataaacgtttcaatttagcgggtgatacaacataccgcgaagtaccagatacttcaaaagtagaggatttgatggtttctcacggtggttatgataatgccgatgcgaaccgcgatatcaattcgatgttcccgttagatcgtttacatgaattagctgcagaaggctttatcaaagaatctgcacctgttcactacgcattcatgggcggcggtggagaccaagacgcattccacgatgtgactggaccagaaatcgctcaaaaattagtagaagaagaagtcgacgctgtcgtcttaaccgctggctgaggaacctgtcatagaactgccgtgatcgtgcagagagctattgaggaagcgggaattcctactattttaatcgccgcattaccaccagttgtacgccaaaacgggactccacgtgccgttgcgccgcgtgtaccaatgggtgccaatgccggtgaaccacacaacattgaaatgcaaacaggtatcatgaaggatactttagaagcattagtatcaatcgaaacgccagggaaaattgttccattaccttatgaatacattgcccacgtctaagtcaagaggctgatttaataagtgtttagcgtcgagaaataagacgggaattcctaaaattgccaagaaacacagtgacgtaggaactgatgttgattggtacctacttggtgcttttcaaatttttgtgaattttcgacttatttctgaatgctagttctacttagcgtagcttgcgtagaagacgctacttattaatcgccgtttacattgaaagtaggtgtgaatgatgcgaggcgaaactttaaagatcaaagtttttcatatggaagaagtcactacaggtaacgacttccgtattgaaccaactcgtttacaaattaagcaagactttgactgcgaggacgccactattcagaagctgacgattcgattgctcccaccgcaacaacatgaagttgaaaccaacaccattatggatatcattccgatctccacaaaggtgttgggtgcgttgggtacagggatcacgcatacacttacaggagtttcagtcgtcatgactggggctattgaagatggagaacaaatgcatgaatttggctcctctgaaggtgttttgcgtgatcatttagtattggatcgagcagggacgcctaaagcggaggactacattattcatgtagatctcttagcgaaaaaggggactccttttaatcgtgagctttgtctgaaaatgtttgcgatcgtggacgattttgttcaagaaattcgcgaaagaatgaagatgctggagggtaaagacgcctgtgaagtacatgtttatgaagagcgtagtaatcctggtaagcccaaagttgctttagtcaagcaagtggctggtcagggagcaatgtatgatatgttgctctatccgaatgaacctagtggctttaaaggtggttgttcgatcattgatatgaacaatatgccggtctttctaacagcaaatgaataccgcgatggggcgattcgttccatggtttaacgtaaataatggataggtggtggcgttatgggaattggcccatcaaccaaagaaacatcactgcatcattttcaagatccgctcgtcgatcttcttggtaaagatccagacattgactttcaaggagtcgttgtcgtgggaacaccgcaaagtaatgcaatgaaatatctagtcgggcagcgaacggctgcgtggttagaagggatgcgcaccaatggtgtgattgcttcaacagatggctggggaaactcagatgtggattttgcgaataccttagaggaaatcgggcgccgagatattagcgtgattggactcaagttcattggtacacaagcgaaatttgtggtggaaaatgactttacggatcacgtattggattttaataaatcagaagccggagtcgagacggaggttgttggtgaaaataccatcaatcatcgagatgcagttaaagcgcttgcgtcaattaaattaaaaatgcgaaaagataatcaacaaatacgttagcgaaaaattttatgagtatgaatcatcaaagtcctatttatttttaaaattaggtaacaagggaggataatcatgaaagtatcaaaaatgatttcagcgatcgatacacatacagcaggcgaagctgcacgtttgatcatcggcggaattccaaaattcccaggtgaaacaatggctgacaagagagcttatttagaaacggaagcagacgacttgcgtagaatgttgatgctggaaccacgtggacaccgtgatatgtttggtgcctttattactgagcccgttcatgaagaagcggactacggaattatctttatggattctggcggctatttgaacatgtgcggacacaacacgattgcagcgatgacatcagcagttgaacaaggctgggtagaggctaaagaaggcgaacgtgaagtaaaagttgttcaagatacaccagcaggaatcgtacgcggaacagttcatttggatgaagactattcagcagaatcagtttcattcgaaaacgtggaatcattcctttataaagaaaatgtaacggtcaatgttcctgaaattggtgaattggccatggatatttcttttggcggaagtttctttgcaatcttaccagcagcatctgttggtttagaaatcaagccagaaaatgcttctaaatttaatgatttaggcatgatcattcgtgatgctgtaaacgaacaaattgagattcaacacccgacactggatcatatcaaaacagtcgatcttgttgaattttatggaccaccaaccagcccggatgcaacatatcaaaatgtagttgttttcggtgatggacaagttgaccgttctccttgtggaacaggtacaagtgcgaagcttgcgacgttgtacggcaagggcgaaatgaaagttggcgatacttttgtgtatgaaagtattttatgcacgaaatttaaaggtgaaattgttgaagaagcagaagttggaggatacaaagccatcattcctcgagtaacaggttctgcttatgtcactggatacaactcatttttagttgatccgaaagattccttgaaggatggtttccttttaggataaagatgaaggaggggtaatatggtaacagtattattagctgtatatgttggtttgatgttgctgcacacggtcaacatgggacgtgactgtataaaacacaaagatgatcttggaaaaggaaattggatcgtctcagggattattggttttgttactgactttttggatacattgggaattggaagttttgcgccgacgacattgcttttgaatatgaccaaacagttgagttctgaccgtttattaccaggtacattaaatgtaggtcacggaattcccgtgttggtagaagcatttatctttacaacggttgtcgacgtatcaccagtgactttattcgctttggttggttcagcaacagttggtgcgtttattggatcaaaatttgttacaggcttaccagaaaagaaagttcagctttggatgggctgggcattgatcatcacagctgttttgatgttcgctcgtcaacaaggctggattgatgttttaggagcagataatacggcaactgctttgactggtatcaaattagtgattggtgtggtaatcaactttatcctaggcgcgttgatgacgatcggtgttgggttgtatgcaccatgtatggcgatggtttatatgttaggtttaagcccgctagttgctttccctgtaatgatgggttcttgtgctggcttgatgccggttgcaagtttgaacttcgttaagacaggcgattatgcacgaaaagtaagtttagcgattacagtcggtgggattattggggtaattgttgctgctaaattcgtaactggactagatttaaatgtgcttacttatattattatcgtagttatcattattactggtgtaatgtatattcgcaagagtatgaacgcagctcagactgcacagtaaagttcatcgtcaaaactacctgctcgatttgagtaggtagtttttttggtatacaaaggagttttagacgcgaaagaaaattttaatcggtttattctaataaaaaattaagaactaaatgatattattttcattttttgatagaatgattcaaacgctttcgtgaagggggaatatcgttgaacgttcaggatatattgagattgtcttccatgaagggagcaaagataatcgctggtgcatctcaaagacagcgtttggtcactacgatttctgttttggaggtttctgaaccaaaactgtatggcggaatgccgattaaaggggaatactccggaaacgaactggttcttacttcttttgctcaaatcgctcatgatgttgataagcagcttgagattatctcgatccttcatcaacacagccagttagggattatcttatactatgttggtctgatcatgcccgaagtttcagaaaaagtaattgctaagatgaacgaattggaaatggttttgattttaatgccgatcaatcgaatggatctgagatatagcgaggtaatttctgaagctttgtcttatatcagcaaagaggaagcggatttagatcctcaacaagaggttttgcttgagacgattcgacagttgcctgcaccgaatcagattgaaacaggattaagtattttatcagacaagttcaagtgcagcttgttcattaaaagtcaggaagacgaggttttgttatcaaaggcgtggccgcgaagtcttgatcataatttaagagaggtcattgctaataaaagggagaaggaagctaaaaaaaatactcctgtagaggtaaatcaaaattattattttcaaacggatattcagttatcgctgtcttccttggagcaccattattacttagcaatttttagaagagaacccttggcagacaagcaaatagatggaataaggacagtcgtcgaaaaaatgattaagtattttggcgagggacagctgctgaatactggccaacagtttttctctgcctgtcaaacagaggattttcatacagctatgctcttagctcaaaaagaaggaattgacgtgaatcagcctttaaaattgtattgtatacaaaatggaacacctaaaagaggcagaactgcttataaaatgaaaaggatttattatcaggaaaaggatctggagtggttgattagtaattctttggacctgacagctacggcaatttttccgttatatgatgttaagacagactatttttatattggtagagagtttttaggtttaccatctgtttttaaacagatgtcatttattctggatcagatcgaagacagtaaaaaggtttttccgaagaaaagatgtttttatccagaagagctatatctgttgaaagatgtgacgcaggagacggaatcgatttttttagagtcgtatttagaggaggatttcatcgagtcgttagcagttttctttttagattgcgatgagaatattaatgatacagcgagacaactttttttgcataataatacgattaagtatcgattgaaacgagcacaagaacgcttaggaatgtctttttcacatacagcttcgcgttatttgttgattaaaaatctaatttattatcgaaaatactcggataaagactgatggaaagccgcttttgtcaatattgacaagacggcttcttctattttgtcagattaacatagtcagagaattctcatttagctataatgataaaatatttatttgtcagaatattcagaaatgagggtgttaaatggaagaaacagtggaaacaaattcgggaaattatgaaagagaacgtgtaccagaaaaggacagaaagcgctggttatccattagtatggtgtggattgctatcgggattgacttgtctggaatgtttatgggggttgcattatcgcaggggatggcgttttggacggctatctatgcagtgattattggatcggttattctaggaatattggcaattggtgcgacctacattggcgcgaaggctggactatcaacgggaatgatttccagaatctcttttggaaagaagggtgcttcattgatgggggcaatcatggggatttcttctttgggctggtttggtgtgcagattgggttctttgctgaaaatattggtgcggcgattaatcaattgacgggtgctaacacaccttcatggctgttgtcattgattggcgggagtttaatgatgctctcggccttctggggctatcaggcgattgagaagttatgtacttattctgttccattattagctgtattaatcatcgttgcaaccctcatgtccttaaatcggaatgggacatctggcttggctagtgcacctcaaggctccaacctctcttttggcttagcggtttctcttgttattggtgtgtatatggtgggagttgttatggcaccggatgttgcacgttgggcacaaaatccaaagcaggcaatgattgctggctttgtagggtttactatcgggaatagttttatgattatcatttccctgattttagtcaaggtgatgaatacggctgatcttacggcagttttctttactttaggtctaggtattccatctattttagttttaacacttgcacaatggacgacgaacacaaacaatctttattccgcttctttggacttttcgatagtgtttaaaaatattaatcctaaactaattaccattgtttgcggtacattgggtattttaatggcgatgtttgggatttatggcatgtttgaaaactttctatcgatcgtgacggttttagtctcaccaattgctgggatatacatgattgactatttcttatacaaagagaagtatgatttctcttacgaagaaaagctgcaggactattatccgatttctattttttcttgggtagtcggcagtacagttgcctttatgactagtcagccgccagccggctttggcttgtttacgctaacgaatgtttcagctttagacggtattttagtggcggggctttgctattttattgtgacaaaattgactaaaggacggaaataactcatggaatggattacggtagaagatttagaaaatatttcaatcggtgcaacgttgctgggaaccggtggcggcggagatccgtttgtcggtcgattgatggcgctgcaggcgcttcaaaaatatggtccagtgagggttttaaaagtagaagacttggatgatgatgctctagttatgcctgttggatcgattggtgcaccttctgtttcgaacgagaaaattgcttcagaagaagaactctatgctcctgccgaagtattaaaggaaacttttcctgaaagaacacaagcgattatgccgattgaaattggcggcggaaactccttgctgccgattgcctgcgctgcaaaaatgggattgccgatcgtggatgctgatgccatgggtcgggcttttccagaatcacaaatggttacctttttcttaaagggttatcagcctgagattgtggcgatggctgatagccagggaaatcgaatcatctattatccaaaagatggagaatggtctgaaaaaattgctcgtgcgattaccgatgtgatgggtggcagcgccaatatggtggataatgtttttcctggaaaagtcgtgaaagaatgtgggattcgcggaactttgagcttagctaaaaaaattggtgaagaattaaccgattcgaaagagactacagctccagttaagcgtctattatctacgttgaaggggtattccttgtttgaagggaagatcaagaatattgaacggaatgtggaaggcggctttacacgcggcagtgcgacgtgtgccggtatcggtaagaataaaggtgaggagttagaggttctttttcaaaatgaattgttgctagccaaaaaagacggaaaagttcttgcttcgacccctgatttgatttgtgcattggattatgagaccggccgtccgattacgacagaaaccttgcgctatggtgcgcgtattcatgtgattgccttaccgtgtgacgctaaatggcgaacaaaaaaaggcatagaagtagccggaccgaactattttggatacgaaatagagtacagaccggtggaagaactgatgggagaagaagcgatatgtatagattagggattgatgttggcggaacgaatacggattgcgcgattttagatgagaatttaaactgtatcggaaaaatcaaaagccctacgatggagaatgttagtctaggaattgatgcggcgattcaaaaaattttagcagaaacgcgtatcccaacggataaaatcagtgtggtcatgttagggactactcattgtacgaatgcgattgttcagagaaaagaaatgagcaaggtgggaatcattcgtttagccaaaccagccaccactgcggttgctcccatggttggctggccggaggatcttgccgaaaaaatgaacgcgcagacagctattgtctcaggcggctatgaatacaatggaaataaaattgctgaagttaatgacacggagattcgtgaagtttgtcaacatatgaaaggcaaagtagaagccgtagcagtagttggtgtgttctcaccagtcaacagagagcaggaaaaacaggttgccgctattgtagaagaagagttagcagttccggtaaccttatctagcgagattggttctattggactattggaaagagaaaatgctagtattttaaatgctgccttaacacaaacgattcagcaaatgattcgtggattgaagcaagcgttaagtaataataacctgactgctgaggtttttatttgccaaaatgatggtacattaatgaatttagaaaaagctttgcgttatcctgtattaacgatcggctgcggtccaaccaattccattcgtggagccgcgcatttaagcaacttggagaatgcgttagttgtcgatgtcggcggaacgacaacagatattggggttttgaaaaagggatttccccgcgaatcgtcactagcaactgtgattggtggaatcagaacaaatttccggatgccagatgttctatcgattggattaggtggcggaacgattgtacatgtggaaaacgaacttagagtcggaccagaaagcttaggctatcgaattttggaagaaagtttatcttttggtggcgatgtcttgtgcacgacagatatcgcgatcgctaatcaaaagaatcatccggtagatggagctatttcacctgatttagaggtgaatctagtgaatcaaacaaaggaaaaaatacgagaactgattgaagatgcgattgatcaaatgaagacagatcgcaaagaggttcctgttattttagttggtggaggcagcatcattctgcccaaagaaatgaacggggtgtcagaagtaattgttccagaaaattatgatgctgctaatgcgatcggagccgctttaggggaagtctcaggtgaagtaaattcggtctattcattagaaaatcaaacgcaagaggaggcagtgagtctggcgatcgacactgctcgaaaagaagcgattgattcaggcgcgtccgttgatactttgaaaacaatttttgtcgaagtcattcctttggcctatctgcctaagcaggccgttaatattaaagttaaggttgctggtaaattgagcttctctgaggtatttgcatcaataaagagctaaaatcatccgcttaaatgagcataaatgcgtttcctattttgtttaggaaacgcattttttaatgctgttctcatcctcaaataagaaatcatcacagaaattaaaaacgtttttatgagagattaaaatcgttataaattggatggaaatatacgtagagaaacaaaaagtaaactgttataatagagaacgtgaaggatggtggaaagcatggagacagctcaacaattgattgtctgcggtggctgcaatgcgaaaatcggaccggggaatttaggggagctactggcggatttaccaaaagcgaccaatgaaaatttactggtaggatttgactcgacagatgatgccgctgttattaaactgcgtgatgacttagcaattattcaaacgttagattttttcccaacgatggtgactgatccttatctttttggtaaaatcgctgcagcaaatgcgctaagcgatgtgtatgcaatgggtggcgaggttttgtccgctcttaatattgtcgctttcccagaagaaaaggacttgaatatattaaaagaaatcttacgaggcggcgctgaaaaggtgcaagaagctggagcaatcttggctggcggccactcgattcatgaccagtcggtgaaatacggcttgtctgtaacagggacgattgatccgaataaaatttatcaaaacaatacctgtcagctaggcgatcacctgattttgacgaagccattgggcgtcagcatcatcacggtaggctacagtgctgaagaaatcagtgaagaagcgtttgtgaaagctaccacgagcatggagacattgaacaagtatgcgatggatattattcgcaagtacccgatcaacagctgtaccgatgtgaccggcttcggcttggctggacatctacatgaaatgatgaacgaacgttttagcgcgaaaattcattcgaaagatttgccgtattttgaagaggcgtatcaaggcgcgaaagaatttattttaactgctggcggtcaacgtaatcgaaattacatggaacagaagatggattttcagcttgatgattttgggattgaagaattgttgtttgatccacaaacttctgggggattattagtcagcgttcctgcagatcaagcggacacgctagtacaggaattacaagctgccgatattccggcacaagattttggtgttgtcatcgagaagcaagagaaggaattgatcgtttattaatcgcaagaagacgaaagtcaattgaggatcggagtggaagaaatgtttaaaattgatgcgttaggcaaagcttgcccgttaccagtcatcgaaacaaaaaaagcactgcgggagcatgaagttgtgcaaacactggtggataatgagatcgctacgcaaaatttgaaaaaaatggcggagcaacttggctatatctatcaaatggatcaggatgcgccgaatcattatactgtggttatttcaaaaggaaatgcggctctgactgaagaagcacctcaagcagctgaatcaatggttacaacggacgattatatcgtggtcgtagatacgaatatcatgggacgcggctcagatgaattaggtaaaaatctgttgaagggctttatctattcattgaccgaacaagatgtattgccgggaaaagtcattttttataatggcggtgtgcattctgtgatagaaggttctgattcgctggaggatttgaaaggcttagcagaacaaggtgtggaaatttacgcctgcggagcttgtttgaatttttacgagttgaccgcagcagttggcgaagtgaccaatatgtatcgcatcgtggaaatgatgcgccaagcaccgagaatcgttaaaccatagagggtgcagagcatcattagaggaatatggcttgaagctgtagcttattgattacagtattatgaaaagaggagcagtttttatgcagacgtacggtgttgcgttgttttattcaacccgggaggccatgaaagctgaggaaatcgcgaaggaagcccaacttgccgttcgaatcattcccacaccggaaaagattcatgctagttgcggcttttctttgaaatatccgttgaaagaagaggaggcattaatgtctttgcttacagcggcagagattgcctcagagggcttttatcatgcagcccaagaaggcctgaagacaaactatatattggttcagaaaggataagcagatggcaaatattgtgataggaacggctgggcatatcgaccatggaaaaaccacgttgattaaagcgctgacgggtatcgaaacggataccaccagtgaagaaaaaaagcgcgggatgtcgatcaacttgggatttgcttatttggatttgccgaataagaagcgagtcgggatcgtagatgtgccggggcacgaaaaatttattaaaaacatggtcgctggtttgccgggtattaatctggttctgctggtgattgatgcggcggaaggaatcatgccgcaaacgaaggaacacattgatattttaacgttattagggattcgtgattacttgatcgtgttgaccaaagtggatactgttgatcctgatttgaaggagttggtcgtggacgatatccgtgaacaattagcagatacgccgttagctgaagcggatttaatcgagacagatgcggtgactggtacaggaatcaaagaactgctggccaaaattcaagagcactcagaagaagcacaagaacgtacagctagcggctccgcgcgattgaatgtggatcgggtctttagcgtaaaaggttttgggacggttgttacagggaccttattagatggctccatcaatgctggggatgatctgtacctttatccaagccagaaaaaaacgcgagtaagaaacattcaggttcatgagacagatgtgaaaagcgctcagccggggcaacgaacagctttgaatttagcgaatatcgcaactgatgaaatccaacgaggcgatgtcttgtctgtttcagagaagctggaggacacctggatgctggatgtaaaagttacctgcctgcctgaagtagagggcgggatcggcttatgggatcgggtccgcttgctagttggtacgcgggaagtaatggcacgaacagtcccattaggtgttgactggattggtccgggagaagacggattcctgcaactgcggctggaagagcaggtagcagtaaaagagcgggatcgcttcattttacgaacctattctccaatgcataccattgctgggggtgaggttttagatgcggcaccacataagcatcgccgtttcaaagttgaaattctggaaagcttaaaggctaaagaagagggcagcttagatgaactaatcgcagatttcatgattaataaaaagcagccgtttacgaaagaaaaagaattattagaatacttaggtgtgggtaaagaagagctgcagccgattttaacggagatgttaacagcaggtcgtgtaattgaaaccaaggtcggctatctagctcagactagctatcaaaaattggtggagcaggcaaccgaaatcctgtcagcctatcataagcaatatcggttgcgctatgggatgccgttagaagaatttcgttcgcggatgcggggtgttttagcggagaaggaaatctccgcgctgatcctgttgatgaaagtggatcttgtcaaggaagccaatgataaaattgctttagccgatttcgaagtaagcttcaacaaatatcagcaggccgcgaaagaaaaaatcgaacagacacttgctaaaaatggctatacacctgttaaaaaagaagaattattcgacttagataaaaatgcagaggaagtcttggaagccttaaacggcgatacggcggtcttcttaacccatgagtttgtattgttagggaaggtttttgatcaatcagtgggattgattcaaaaatatatcgcagaacacgggcaaatgacgctaggagattttcgcgatttgacagattccagtcgtaagtcttccatgctgattcttgaatatatggacaagcagggaattacaaaacgtgtggagaactatcgtgtgctaggagagaagggaaaataaatgagcatttatttggataatgccgctacgactgctcaaaaaccggctgtcgtggcagaagcgatgacgacgattttaacaggtgaatatggcaatccctctcgcggtgctcacgggtactctctagcgggttatcgtgtggcggaaaaagcccgtaatcagctgaaggagctattcaaagcagataaacggtatgaggtcgcttttacaaataatgcgacggtcgctctgaatgaagttttgaagggcttgattcaggcgggagatcatgtaatcacgactgcttgggagcataattctgttttacgaccgctgtatcagttagaagccgcaggtgccagctttgatgtggtttctagcgaagcattaactggtcgtcttaactatcaagaatttgccgaaaagcttcgtccagaaacgaaggctgtgatttgcaatcatgcgagtaatgttacagggaatctactggatctagaatgggtcaagacgttttgcgtagagcacaagctttatttgattattgatgtttcgcaaactgccggagtagttccaattgatctcagtgatgggaaaatcgccgccgcttgttttacgggacataaatcactttatggtccacaggggactggcggcgtttgtctgctaaaggatctgcctttggagccagtgctcacgggcggcgacgggatgcagtctttttcaaaggttcagccgaaagaactccccactctattagaagctggaaccttgaatatccctggcttagcgggtttggccgctagtgttcaatgggtaaaagaaaaagaagaaaaagcaacattgggtgattatttttatcatgagctcaaaaaaattgatggtctgacgatttacggtgatttcagcggtccgcgagtggatgttttttcgattaatatcaaagatgcggaatcggcaatcgtcagtgatttattatgggaagagtttgaaattgcgaccagaccggggtatcattgtgcgcccttaatgcacgaagcattgggtaccgcggatcgtgggacggtgcgtttgtcgttttcgagttttaccactaaggctgaggttgatacagtcttagcagcattacaaaatctggcgttacgctaagaaagcaggtggcctatgtcaaaagagattcagaatattttagcaagtttgccttccgtagatgttctattgaagcagattgattcaaattatcctcatggaaaagccaaagaagctacgcagcaggttttagcaagttttcgagaagcagtagttgacgggactagaaaaaccgtgattgaccaaaaagaggtcgtagaactgattcacaagcagctcgaagaaaaacaattttcactacgacgcgtaattaatgggaccggaactgtaatccatacgaatttagggcgttcttcattaagcgaaaaaacacaagaacagctcctagcaaccagctttcattactcaaatctagaatttgacttagaaagtggcaagcgcgggtcgcgttatagtcacctagtatcaatcgtgaagaagctcacaggagccgaagatgttctggtagtaaataataatgcagcagccgtactactcgttttaagtaccttgacacaagaaaaagaagtgttagtttcacgaggcgaattggtggaaattggcggagcattccgcattcctgatgtaattacgtcaagcggtggcacgatcgtggaggtgggtacgaccaacaagacgcatttagccgactacgaaaaagccttaaccgaagaaacgggtgcgattctaaaggtacacaccagtaattatcgcatcgtcggatttaccgaaacaccggtgttaaatgatctagcagagctggcccatgccaagaacttaccattgattaatgatctaggcagcgggttactgatggatatgcgaccgtttggcttgccttacgaacccacagtgaaagaggtcctagatcaaggctgtgacattgtaaccttcagcggagacaagctattaggcggtccacaggcgggtatcattgttgggaaaaaggaatacattgacaaaatgaagaaaaatcaattattgcgagctttgcgtatcgataaaatgactttaagtgcactggaagcaacgctgtctttatatcttgatgaaaaagaagctttaaaatccgtgccaaccttacaaatgatcggacaaagtgaagaggactgcttatgtaaagcagctgaactagcagcgatgctgcaatcaatcactgagctaagtgtaaagatcgaaaaggacagtagcaaaatcggtggcggttcttacccagagcacttattgccgacctatgctgttgctttaagcagtagtaaattctctgcggatacgctgcaagaaaaactgcgattagctgctacaccaatcattagccggatcaaggatgattgcaatttcttggacgtacgaacgattgcgatagaagaattcgcagcaattcaggaaagcttgcaggagatttttaactaaaaagaaaggagataggattatagaaccacagaagcaattagtagctgtgtctcattgtgttttgaatcaaaatgctgtgattcacgggtgggaaagagcacgaggagccttcccttttgcggtcgagttgttgcgcagtgggattgcgctgatacagctgccgtgtcctgagtttatcgtcttaggcggagatcgtccgccgatgacttatgaagaataccgtgatttgcctgattatcgtcatcaatgccagacaatgctgcagccgatcattcagcagattcaagcgtatcaagcagaaggctatcagtatctaggaataatcggcatccatgaaagcccgaattgttccatcagcgggcaacgaggtgtcttaatggaagagtttttcgcagaatgtcggcaggccaaaatcggtacgaattatttggaggtgcctacgtcttacagtgaagaggatcaaggggattttgatgaacagttgcaacgttttttagagaaaggactagacaatgaatagtaaagcaaaagtgatcgcgatgtgtgccatcgcggtaggattaaatgtggtgttaggagaagcagtgtcgatgctgcggattccattattgttcttagatacgatggggacgatttttatcgcggccaattttggaatgggctatggaatcttaaccggtgtgaccaccaacttattgatggggctgatcggcggagtgacggcgattcctttcgcattagtgaatgtggctgtcgcgattatcgtcgccttattagcgaaaaatggttttggttttggaaaagcagtaatcgcaggtcttttgttagcctttatttgtccaatgattggcgcaccaattcgattggccctgtttggcggttttaccggttcaggaacggatgtcgtcatcatggcattgcgagcgtctggtaaggaaatgatttctgcaacctattggggcgcagtgacgggtaatctagtggataaaattgtttcttgtctgttagtagcttggtttattaagctgccgcagatgaaacgcttcgccgtaaaatgagcatgaacggcgtctaagactaaggtgcttagtctggaaatcttaaagtgagctagaatcaacggaaacagtgttgaggctagcttattttttatgttcatttttgtcattcatgtaactttaaatcagtgtttaagggagaagtctgtctaaggtatctgaatttaaagaaaaagcatgatcatgcggtaaaattctttttttggaatttcaaaataataaaatgctgattcaagtaaataatattacgaaaaagtttagtataatacctgtttttaaagatttgacgctgaccatcaataaagggaacaaaatttggttagttgggatgaaaagctggtatcaaaaaagttgagggtagctttttgtcggcgaaaaatcttcaaaatgacaaaaatgttaggtgtttttagtaggtttcaatggttggattttcagaatttttgtatagttgctctagaaatcaaaaaggagcaatcagttatgaaaaaatttttaatcggtttagttagtttaattgttatcgcctttgtaggcttacaaatagcagataaagtcgtcaaaggtggagatgagtatttcgttcaggtcacaacagatggtcaacgagtggaagaaaaagatgacagcggcaataattacgttgattacaaatactcgttgccaggctatgacaaggatggaaacaaaaaagagttagattttaatgcaaataaagaccgtccgctgcgtcgggaagcgtttcttaaagttacctggaacaagaaaaaaggagtgacttcctatgaagaggtccaacaaaaagatctacctaaaaaagcagcggataaattaggtgtttaatttaaccttgactgttgtattgaggaagaagacgggtcatcaaaaatgaccctcttagtttaattacgaggagtggaagtatggaaaaaatcgtatcagtaaatgaggtaaagaaaacctacggaaaaggcaatcagaaaaaaactcaggccttgaaaggtatttcatttgaagtagaaaagggtgaattcgtcggaatcatgggagcatctggttctggtaaatcaaccttattaaatttattagcaacattggataaaccaactgacggcaaaattcagattaatcaggcggatgtaaccaaattatcgggcaatcaattagccgatttccgtagtcgcgagattggttttattttccaagatttcaatttgttggaaaatttaacagcagcagaaaatatcgcagttccattatccttacaaggggctaagagcaaagtcatccatcggcgagttgctgaagtggcaaaacgtttatcaatcgatggtattttaaatagctacccggcccaaatctctggtggtcaaaagcaacgggttgctgcggcgcgcgccttgattacccagccaactattcttttgggagatgaaccaacaggtgcgttggattctaacagtgcaagggatctgttagacacgatggaggaattgaatcaaagggatcaagtatcgattttattggtaacacatgatccgttttctgctagttattgtcaacggatcttgttcattaaagacggcgtgatctatcaagaagtaaaaagagaaaaccaaactcgggaagctttttatcgtcaaattttaagcattctcggtaatctggaacagtaggaggtcattcgatgcttttaaaattatcacttgctggaatcaaaggacgcttgcgtgactatgtggtcttattttcaggacttgtagtagcctcaggaatcttttatatgtttgagggtctagcaacgaataagacctttttggaaagtaattcaatgatctcatcggtagtaatgatctttcatttaggaaccgtcctactttcaattattaccttcgtctacattttatacgccaactcctttctgatgacgatgcgtcaaaaggattacgcgatgtttatgatgttaggagcaaaaggccgtaaaatcgcacagttgatttttattgaaacttttgtggtaggtgttggcgcgactgttgtcggcactttgcttggtattggattaagcggtgttgtgcagcaattattggtcaaacaattagacattaaaatcactcatttcaccgctgtaaattcttcagccgtgctatttacattgatttttttcaccgtgattttcttattggcagcattcgtaaatgccatgacgattgtgaaaaagccaatcttgaatttgctaaaagctagtgaaacgcctctacctgctaatcgtaagctttttacgttagtattggaggttctggcaggaatcattttcctaggaatcggctacttcatgatgacgcaattaatgaagctagcttttctggccttgattattgccttgattaccattattttaggtacgtattttgtttttcattcaattttgattttcgtactggatttactgaaacgacgtgatagcatcgctttaaagaagctgaataattttacgttgtcgcaattaagcttccggattcaagattatacgcgaattctatcgatggtggcgatgctttttgctctagctctcggtgccattactgttggattaggcttccataatgaaatcatgaaaatgactgaagcaacttctgcttatgacttagtattaaacaatggacaaagctttagtgaaactgagcttgataaaatcacaccaacttctgatgctgtttatcaacaaaaagaggataatgagaccgtttattatgatcgttcacaatttgatcaagcccctttgaaggtcaaggagtttacggctagccgtcaaacgaaagaagtgcgctatacgggagaacagttggcaaacgatttgtcagcctcggatcaattaagatcgttggaattaccagagcaaagtgcgaagaagcatcaatttttatctagtgaagcattctcagcattacctggtaacacaacggagatacggttgattacagtggctgattttgccaaagataaggatgctttgaaaaatttagccgaagaaaattttcataaaaatccgacgttggataaaaattcagcaggcatgaatcaaaaggctctggtttatgagctatacaatgcgctgttctcaggctttgaatttatgggcttcttcttgggaattgcctttctaaccatgttagccagctgtttgatgtttaaaattttatctggtgcaaaaagtgatatccaacgctacagcatgctggaaaaaatcggtgcacgccgtcagttgttgaagcaatcaattcgcaaagagatcggtatcttatttttggttccaggcttgttaggagtcacgcatgtcttgtttggactgcagttattcactacacttttgtctgaaccttacagcaacatttggctgccatttttgatcttctttgttttatactttatctattatgtattaactatatggatatatacagggattgtcatgaaacgcgaagcctaaaaaaacacctttcagttagtcgctggaaggtgtttttgttattttatggataattattaagaatgtgaaaattttatgtcttaggaaattttcacttgacctgaaaaagcgataaaattcgcgggtctttccttaaattttaaaggaaaaaccgctatttaagccaaaaaataagattgagccttcaatacaaataaatatgcatttttttatattctgctctatagtagaaacggacaatttaatagagaaagaagtgatccggatgaaccgggtaaaaaaagcgtttagcaatcgttggctgatcctactgacagttagtctgctattttgggcaaaaacaattttagcctattatgtagatttttcattaggggtggaagggtccattcagaccttcattttgtggatcaatccaattgctacaaccttgctgttgtttggcgttttcctttacgtaaaaaaatttaagccagccttgatcgtgttgtttttaatggatctgttaaataccttgatcttatacttgaatgtgattttttatcgtgaatttactgattttgttacgatcaaatcaattcttggtttttctaaagtttcacaaggaatttcaggcagctcctttgccttaatgaaggtgcatgatattttttattggctggacgtaattatatttttaggcattctgatctatctctttgctgaacacaaagaaattgccagcaagccgatcaaaaaaacatttgcagtggcagttagctgtctagcagcattgaccttctcaatcaatttatccttaagcgaggccaatcgcccacaattgctgcagcgaacctttgaccgttcttatatcgttaaatatttaggcctggatgcctttactgtttatgatgggatcaagactgagcagaccaacagcgtgcgggctcacgcttcaagtaatgggttaacagacattctaaaatatacgaagagtcattatgcagcgcccgatccaagtaaatacggtatcgcaaaaggcaaaaatattatcgtgatccacttggaaagttttcagcaatttttgatcaatatgaaggttgacggacaagaggtaacaccatttttgaatagtttagaaaatgacaataagcaaacattagccttcgacaatttcttccatgaggtcggtcaagggaaaaccagcgatgcagaaaatatgctggaaacaggcaccttcggattgtctcaaggctctttatttactcaattaggatctgacaatacattccaagccgctccggcaattttgaatcaggaagcgggctatacaagcgctgttttccacggaaatgtcggcagcttctggaatcgcgatcacgtatacaagaatctcggctatcaaaacttctttgatcgctcttactttaaccaagctgatgaaaacttaggctacggaattttagataaggatatgttgaaggaaacggttggtcatttagagcatttgcagcaaccattctatacgaaattcttgacggtaaccaatcataccccttatttgactgacgataagaattttaattttcctgccttaaaaacaggcaatagcacggtggatgattatgtccgaaccgcgcattatttggatgaatcgctgcgtcaattttttgattatcttaaagcttccggtgtttatcaaaactcgatctttatgatttatggggaccatttcggtatctccgacagcaacaacaaagatttggccaaagcattaggaaaagatccaacgacttgggacaaattcgatgacgctcaaatgcagcgtgtaccattgatgttccatattcctggctatacaaatggtgggcttcaacatcaatatggtggtgagattgatgtcttacctacattgttacacttaatgggcatcgatagtcagaaatatattcaattcggtacagacctattttcaccaaaacatgatcaaacagttgccttccgtaacggcgactttattacaccaaattataccgaattagggggcgagacctacgagaataaaatgggtgaaaaggttgatgtgaaagctttaggtatcgcatcagagattgataaggaacaaaaacaggtcaaacaagcattgagtctatctgataagctgaaccaagaaaatctcttacgtttttacacgccagaaggcttcacaccaattgatccgcagaaatacgattatcatgatcttgataagaaaaatacggcaatcgaaaaggaaaaaggcaatcaatcaaccagtcttttttcaaaaaatggcaacaagacaacagctgcattgtatccgccaattcaatagtacacgtagaggttgtgacagaagtggtcagcttcaagaaataagaagaaatttccgaaaattgtttctcaaatttttgtgaaatttcggcttatttccgaagaagctacttctggaacaccgtttattcggaaaaagaaggattgtattaggtggttcaattcctacacattcccgccatttagttcattaactgagtgataatttgataaagcaaatgggaaataagcaacaccgttaagtcataaaacgtatctttcaaaaggtttgccgtatttttctttaacgagttcatcataagaatcatcctttcgaatcaataatgtccttaccataagcagcgaaacttacgcgctacttaaatagagctaagaaagtctaaattattcaacagaaaatccgattgcttcgtgatctatttcagattaaaataaagatataaagtttaaagggcaggattattatggaaaattttgaacagatacttcagcttatttttcatcccatcgttttggcactggatgccatctcgatttttatcattttatatggggcaattttttcctttgttaaattaatccaatcgagaagtgagcaggattattcttctgtgctgcacaaaaacaagtgtattaaagcctatttaggcagttatattttgctgagcctggaatttttgattgttgcagacattattgaatcaatcatcaatcccacctttcaggatattatcaagttagcgatgatcgtgctgatccgaacgatgatttcttatttcttaaataaagaaataagtgaattttccgtcgatcaataagattttgaggaaaagatcatcctactttgaatccaataatttagtaatttttaaaaagaaagaagcatttaagataaggtgaattctttctttttttcttttcattttgttattgattccaacttgaaggagtggtatgattattttgtttcgggagtggatgggttctggtgttccctctggtcttcaaaaccagtatgaggagttaggagcttcttgggtaggttcgattcctacacattcccgccaattaaactattatgtctgacaaacactgatttgacgccaatctcagcagtgtttgccggacttttttatattttagaagtttataatagaaattttcaaaacctaagaaagaggagtttagaaatgaaggaatacaagtttgattctaaaatctatgcatcagaagtaggaaaaggcggtgcttacgtaatctttccctatgatgttcgggaagaatttggtaaaggccgtgtcaaggtacgtgcgacgtttgatggtgttgactatgatggaagtattgtgaatatgggggtaaaaaatgaggatggtagtatttgctatattttaggaattcgaaaagatattcgcaaggagataggaaaggatattggagatgtggtagaaattgtggttcaggcgctatagattaacttagtatattttctcgtgtaatgcacaatattggaaaaataagacaataagaaagaatgtagaacgaaatacgtttaatattttttattttagatgactgtttagcttcaaaagttattgttcgtgttttctgctatttctaaatttatttaaatagaaattgaatgcgttaggcttatcttaataagtcaagataaataacctcatgtccagatctattaagaaaaaaactgaaaacttaatattttagatgttatagttggtaaatgttcatattaagtttgcttttactctccatacgtggtaaggtaactaagtaatactttgatatgtgactagttggttatctatatttattaagatacttttttattacacgtcattttttattacaaataaacacatttgatgtgtaattggaggtactttacatgaataaaggtacagtaaaatggtttaatgcagaaaaaggttttggttttatcactggtgaagatggcaacgatgtgtttgctcatttctcagctattcaaggtgaaggttttaaatctttggatgaaggccaagcagtgacttttgatgttgaagaaggccaacgcggcttacaagcttcaaacattgtaaaagactaaaatttgtttaattacggatgactaagaagatcggaaacgatcttctttttttaatatttgaaggaggatgttcacatggcaagcacttatggatttaaatctccaaatccctcttttttaggggagcgcttctcggtaggccaagaggtatttttcgaatataaaaaagaaacacaacgaggcattgtaaaaaataagttgaataactcggcaattgttcaaatcataaaaagcgaaacagaggatctgaatgatttcacaacagtaattagttacgatagcttagttgatccgaaaacagatttttaaaaatgaatgatttttccttgaactaattacgattactgacatgaagatagttaattgaaatcgctcaaataaacgaccctagcctaggatcgtttattttttattcaaaaaattcaaatactccaatcgtaccatttgctcgaaaaaggatgcggtaattttgataggataaccccttttcatacattcttgcatagactttgaccgcatgctcaaaggactccttatttactcctaaaaactccgcacattcccatacgtttgaaaaacgctctttgtagcaagcaataatatcttctggagtgacgaccaaggtagcgccaatatcccttgctcgttgttcttgttttcgctgctcagtcgtatcctgacttattagatcgcctgagctagttaaataatgggcaatttcttcggcaaccgtatctgtcagctcttcggaggtttgacgaggatttaagtagacatgcttgtcaatatacaatcctttttgtccatctggcatggaaggatcgaaaatatagttgattccctgaaaactggccataagtttttctgctttatccatctgctcaatccttcttcacgtgcttatgcttaataaaatcgatgtaattcaaaatatcttccatctgttcctcggtcacttcatcgtcaatatgagctgcgacagtcatttgttttgctgaaaaagagttcttcgattctcggccatgcaagtagtccagcgaaacgttaaagaagtccgcaattttattttgtgtttcaatatcaggtgttcgttttccttgttcataagaagcgtaggtcgttttcgcaattcccaatttttttgccatatcagtctgagtcaaaccaggtgttttttttcttaaatccttcaattgttgagcaaacatagacacactccttttcactctataatagcacgattcgtattaatttatctacaaaatagaataaataaatttacaaagtacgcgaaatgtattaccattaatttagaaaaaatagttaactacgtttttaagctatgtatcattaaaattaatccgaagttccctgtaaccagtggggaacgttagttattttaaggaggagagacgatggagaaatggaagaaagattacttgaagggcatcctacaagattatcctaagatggaagactattacttggaaagaaaagaaaagctacttttgcataatcagaagacacatcaacgagccaatacagataccaaggataagaagttattaatctcaatttcccttgatcggcaactgattaacttggagcgaaatcagcgaatcatttctttgtgtttagaaaattcgacggaagagacaagaaaaattatcaaattgctttatatgacgaatcatcgaaaggttaatctcgatttggtagctgatcaagtttttttaagtaaacggcaagtcattcgtttacgggatgctttttttgaagaactagccgaacatctagggatatgatgtcttttttttggcactaaaacaaacatacgttcgtatatagtgtaagtagatcaaatggagggggatgaacaggcaatatatttgatgaatttaacagcgtgggctttgattgtttggaggttttttgacaggtggatttcctactctttgacggctataagttgttcgtataaggaaataaagaaatttctgtagagtttaacccttctgaatgaaattgaagtctagatggagatagatgattaatttttaaaggagcgatgaagcatggataactttatttcaacagttcttaacaacccggaaagcatcggatttccagtgctttttgtatttttattagtttgggtgatgaagcaaaataatgcacgtgaagagcgctacttgaacacgatcgacgatttaacagagtcacttaaacaaattgagagaatcgagacaattgtcaatcgaatacgtgaaaggataggtgaaaatggatgagattttgacacatattttggcgacagggttgagctttgcaccgatcatgatgatcataacagagggtgtgaagcagacaagattaatagctacacggtatttaccaatagtgtcattaattcttggcacagggttaggagtagcgatggggcttcttttcaatcaatcgctagggaaattggcgctcggaggtcttgttgctggtggtatggcttgtgggttgtatgatgctacgaataaatatggacacaacagagaaaatccctgaagacctattatcttcagggatttgtttttagtttttctccgccttcacaatcagcatcatgggtcggcgcatttcatccttcattccagggatatccagcatattcccaggcggtattggttcgacaatgcgtttaatttgaaagttattcgtcatcaaatcatctaaataggtggttaaagtgcgatgatatttcgtgatattactaccgagaaaatgcgcgttgcgctttccttcataaaagtaattatcgacaggaaagtgtacaatcgtaccatttgcatcataaatccagtcttgagaaccttctgccgtaaaaatcggatgctcaacggaaaaaatgaattgtccgccggaaaccaaccaatctgccatattttttgccaattttttgaaatcttcaatataatggattgctagggagctaatgatgacatcaaagctattcggctcaaaagtgattttatcaatgctgtcgtgaaggtagcaaatattgtcaaaggtattttttttgcatgcgacctctagcattttttcggagatatcaacaccaatgactgaagctgcgccgtgttctgctgcgtaaagacaatgccagccataaccgcaacccaggtccaatacacgctttttcttaaaatcaggcagcaatctttttaacgtctgccattcgccagccccatccaagccttgttgactgcgagtcatctgactgtagctttcaaaaaatttctcattattataaatgtttttcattgtaattcctccatgtaatttgtatttggttaaactacatggagaaactctctcttatgtgcgatcattgttagtcctcgctttcgttagatttcattcatccaataggtgcgatcaatcggttcgacgaaaatctcgaatgcgatggattcgttttcaataatatgagtaattccatgaaccagcaaaaatttgtcaggctgtcttagctgcaacgtgtcacctacattaggaagtagtgtaagatcaatggttcgttcttcttttcgagtgaggatattttttaaactagctttatacatgtctgttcctccatttgtacttgtgtatcacagtacatagtttaacacacaaagaccggagaaaaagaagtgattttcgtttaaaaaatccttttcggtaaagaaagaagttgaacttcaccgttctcaggatctagctagatagtatctcgtaagtagtcaaactgagaaaatgaggaccgaaaaaaagaccggccaaagatggcaacggtccacaagtgaaaaaaacaaattctataaaggatgggtaatacccagtttttactataataggaaaaggctttcttggcaatttttttgctcaaaaagagccgtcgcagggcaacgacggctggagtcctgggaaggaactcggataaacaaatgaactactgtaaccttaatggattgtcgaaaaagatacaagaaaaatgctcagagaatagcagaatagtataaacaaatgatttatttaagtagataagattgaagagggtaaaatggttagttatgtcgatagctttctaatagtgataattttgtacgcagttcaacgaaggagatactaagtaaaaagttgatttcgtttcacagatcgtttattttcctttataatttaataaaggaggcggttacaatgatgagtaaatacaaaaatattttagtagcgatcgacggatctgaacattcagagcatgcttttgatgaagccgttgaagcagccaaacgtcacgatgccaaactgaatgttatttcaatcattaatgacagtgaactctccaccagcgctttttcttttagcaaaatctatgcggcggaaaaagagcaaattgaaaaagaaatgttgaaaaaagttcatgacgcagcgcgtaaagaacttgagaatgtggaaccatttgttgaattgggcagtccaaaagaaaaaattattgagtttgcaaaagacaatgacattgatatgatttatcttggtgctaccggaaaaggcgaaattcgcctgtctcgaattggctccaccgcagcttatgttgttaaccatgccccatgtagcgtgactgtcattcgttagatgtcttgataataaaagaatggtatagggaaaaaataaattcattagtttgaaggagcagataatatgatcagtagatataagaatattatggttgctgtggatggatctgatcaatcggagggcgctttttttgaagcgatcggtgcagcaagaagaaatgaagctaaattgtacgtcgttcaggtgattgatgattctagtattttaatgagcagcgcgcagccgatggaggatatcctagcagaggaatctcaacgagctaaacaatacctagagaaactaaaggaacgtggtcgctatcaaaacatggaacttattcaatacattggtaatcccaaaaaagcattaacagaagaattgccgaagcaatatggtattgatttgatttacgtgggtgcaacaggtaaggggcgctttcaacgtctactagttggttcaactagcggatatattgttaatcatgctccatgtaatgtgatggtcgtacgataaaaaaaggttttgacgaaggagttattcgtcaaaaccttttttaaattgttttttcaataaagtatagtgattcatgtctctcaattttccatgaagcagtgcatcttgaggttcagtactagttagggtaaaaccgcagcgttgggctatacgattgctaggagcattgtcgacatcgacacaaattaacagtttgttcattccgaaatcattaaaggccaaatgacaaagggctttaacgctttttgaaatgattccgcgcttggtaaaagaggagtgcagccagtaaccgatttcgcctttcccaattttggggtcaatattatgaatatcgatacagccgcaaatcttttggccctgtagaatgaaaaaaagataatcggtaccatccgcatatccatgcaatttcattttgataaagtccttttcatcctcaatcgttttcgtttccgccatgacatcaataaaggcttcaatgtgcgatcgatcagactcaatcaaagctaaaagttcttcagcagcttctagctgaggaaaggcaaaagctaaatgatcatcaatttgataagtaaaggcattcatagtcagatcctccaaagattattttatccaacatatcagtcttagaaatgaatgtcaaaaaagtatctagcaaatccttatttttattaattgaaaggttaaaacaacttaaaatttagctgtttcgagggcttttctttgttgcttttcattataaaccgtataatttcggatggactattaatgttaggtgatgaaatgaagaaaaaaagaatcgtgattctgctaattttcctagcagtggttagtggaggaatttattttgcccaagggaagaatgaactgacggaacggattgtgacacctcaacaaaaaaataaaatcgtgttagatgttcccttagagagccagtttgatgatgttgccttggaaaatggttgtgaggttacggctctttcgatgctattgcagtattacggttacgatacagacaaaaatgaattagcagacgaacttgattatcagccgttgtatacagaatctggtaattatggaaatccccatctaggattcgtaggggacattaccggtggagatgaagcgatgggtgtagctgtagagccgattgcaaaattagctaaagaatatgtggaggatgattatcgtgtagtcgcgagtaacaaaaaatcattcaataaaatcatggctatcgtagccggcggcacaccagtctggatcgtcgcgacggtggacttccaagtgccaaaggacaatgactggttgttgtgggagacagatcaaggaagtatgtatgtcacgccattagtccattcagccgttattactggctttgatcgtaaggaaaaaattgtttacgttaatgatccttatgggtatcaaaatcgtgaagttgattggtctgatatgaagcaagtctatgaggaatctgatcagcagtcattgtatttagaaaaaaattagtcattttttaccacgtcaagtcattttgaggtggttttttaatgttctgtgaataaaatttttcgttgtgaggaacattggtattataggcttatcacggtgaaaaagagcttacaaatgcttgcccgcttgttatactagaataaaaatgggaaaggcttatgaatgaacgctattacaatattttggctgcggtagatggatcgccacaggctcatcaagcataaatggaagctgttgaagccgcacgtcgaaataacgcacgtttgtataacgcacaggtgattaatagcagcggcttactactaaatagtgcaacgccaatcgcccaaataatcgaagaagagaagaaagccgcactcaaactgttagaaaaagagttttcaggaattgaatattacaataaacaaatgatcatttgtgtggaaagtcctaaaaaggctctttattttgaactacctgaggtatataagattgatctgatctatattagcgctactggtaagcgaaggcttgaacgaatgcttgtcggatcaaccaccgattatgttgtcaataatgctccttgcgatgtcatggtcgtgagataaaaatagatttataatccaaattaaacaacttaaaacatctaaaaagggctgatagattattcaaccctttttgtgtttagtattattagtgatcgttgtgcctcaggaataaattgttcttcctccactaaaagtgctttactttggggaaaagctgaaaagcagatcaaaaatttccactgaatcaataagtctgatttgtatgaatttctaatttcaagtagagattgataattttgtacagttgccaaactgggattataaaaagccatataaccgatcgcatcaatcaactcccgcagcttcgaatttggaagctgtgttgcagcttttaaaagaactggaaaaatctctggtttcatacgtcccagtgatcgagcaatcaaatctcgcggcaagggaaaagatttcttttttgaaggagccactgggaaacggtgctgatttgttccaatttcggcaagaaaaggaatcatttgctgagcagtcattgaatcgccgctttctagtttttccgtaatggctaatcgagtgtagagggctggttcctttatcaaagaatgcaataaaatgtttactgtatcacaatttattggcaaaagctttgcagagatagtccgttcgtgggcttcttttgaggaaagtaactctattaattctgcaagttgtttctctttatatggaaagagttcattattttcagcccatccacgtcgtttacgctgcatatatttatccaagtgatccactccctttttaagagtataacagaaattctcgttatataattttgtgtttttattcacaaaatcgttgatttctgatactctctatgatattatcgaaaaaagaaggagtgatgggtatgaaaaaagtagtcgcgaatccaatggagctgcgagatgctattcgttgcgagaaaagaaatatttcaatcacgggcggctttgctaagatgatgcagccattagtaacggagaaagaagtggacgttgaaaaactagatttaccgacttttgttaagttagctttggatcctaccaccatggagaccttatctactgcttatcgagttgctaccaaaaatggaaatgctggtgttgaactagaatacgtaaaaatctaatttttttcatctttcttgtgaaaatattatcaaactagaatagtaatatccttgtagtaatatgcttcaaggatatttttataagaactaaatcggctaaatatattgataaaagtaatttttataatttatttctaatgtaattaaaaaaagggaatactttcatggaataaaaatatttagtaacattcagaataaatttaaaaatgttaaaaaaacaattcgtaaaatcaccaaaattgcaaagaaatctgttaaaatatgaatatgaggaagacctctctcaatctttcttagctagttttatttgactagcatcccctttaagcaccttgtgatcaaggtgctttttttggttataggaaaagtattaaattttcacatgattgaatcgctttacaacaagtatatgcatgttctgcttttgtgggtggtatatgaggaaatgaacaatgattttatcctgaagtaattattaacgataattgatctgtaggttttcttattaaaaaaggatatctagtaaagtcgtcgtgtcctaaaagatcttaataaagaaagcgtttactatttgctgtacaaatatagtctgaattcgttacaatagaaaaaagggggtcttattatgaaggaatcatacaaaaaaatacttgtcgcagttgatttatccgaacaggcacgtcgagccttccaggaagctatcgaagtcacccgcagaaatgatgcacatttgtatattttaatcgtatctgacaccaatcatttaggagctgaaccttacgctgtagatcatatcgtaaaggaagcacaaaaagctgcaagtactgttgtggaagcattagaaaaaacgatcccagaggatatatcctataacactgtcgttgatgatggaaatccaaaagctaaaattgttgcttttgcagaagagaaaaaaattgatttgattttgatgggcgctaccggaacgggaactttctctcggttattattaggttctacaacagcatatgttgtcaataacgcaccatgtaacgtaatggtcgttcgataaaaaagaagccagcacatttgctggcttttagcttgctgtttgatagttttgaatatcattcattaatttggttctgcctaagaccgcgtattttgcgacaataaattgtcctcgggtatttcgttttcctaatacaacaattttcataccagcttcgacatctgccaaaaaatttaatgaatgggtggcaatcagacagttgatgtttgcgagttgaaaataaactaaaggctgttgcgagaattgaatgatttttagtttcgtgacagttcctttaattgactccatcctttttcctccttgtatgaatgcctttgaaaacgagctcgtcatttctacgttcaaactgaaaatagatatcctttttgcgaccggtctttttagcagggatgacaaaataatcacgattttcggcatccatcttggcggtaatttggcttaaaaataaagctagtggcagggagtcttttactaaagaatcatacgttcggtaaaatatttcaacagaatctggactaatcatagacatggtcatcacctcaagattattatacgaacatttgttcgataagtaaagtgttaagttgaagtcttttaaaataaaatacgcgaagaaatgagaaattctgcttcgagcatgtcatatgaaagttaaggctgaaagataagagaagcacgcttgcaaaggacaagcgtgctacgtatttttaaaagtatttagtgtctacgtttggttctttttcccatttttttcaggactaatgcccctgctataatgattaccccaccgaaagcaatccatagaggatagttttcttgtttattagatttgacagctgtagtaggttttttcacgctagatgtaacttcagctacggtattctttgtgttgcttgttttggttgtgttgctttcgttggtaaaggaggttgataaatgataatgctggtcaaagtctgttcgatcaatagatggttcgcttaattggttgttctcatttaaattggtttgagtcgagtatgttccagtgactgttaatgttgttgaaccagttccttctacgacggtttcgccatctgctatgatcgtcgcggattttccatcctcgtcaacaatttcgccgcctgtctccaaatttaagttggttatctgtgaatcggcggtcattacccatttagacgttttatcaattgttacagtgatcggggtttcactggctgcggtattcacttcgtttgcagtgatttcggtctcgccgttgtaagtcgtttctttggttaaaacgagattgagactgctaatagagtccacactgatcttaccggacaattcttgattgattccaataaagttcactttgccgccattactgccggctgtcccccaattattggcattatttccctgaatcgttaatagcgctgccttatcgctatcaaaatctaacgtattatccttcaagataatgtttgcttcagtatttgttacataaaacatcgttccttcagtggcacttttcaaagtggaattaacggcttcaaaatttgctgtttcaccagtggatgcttcggcgtcacctgacgtggattgataaataattacaccgtttgcgacaggatcactgcctgttgttccggttaacttactgattaattcagaattgtagatttgaatggagttatagccttccataccagcaatctggctgcccgtagccgtacctttgacattactcacttcaatgtcacccgtggaatatagtagaggtgagcctgagccttgtgttgcaagctggctatcagtgactgaaacatttccgccgccgcgatctgttgctaacgccgcgctatgatcgcctttggtactgacggaggttttgttggcaatgatggtgccgccgtaggttgcatccatcccccgagaattgtccgattctgtcgcgatggtattgtcatttgcataaatcgttccgctatctgttgcgaaaagcccattacttcctttatcgttagcagttaattgactgttagaaagatacgcaaaggaattctcgtttactgccaacaggattgaattcaatccatagaaattgctattgtcatcgttagcacttgcgccggctttttctaatgtacttttctcaagcgacaaggttccaccattttttactaaggcagtattttcgtcattgccgtcagagcgttgcttttcggaattagattctatttcctgattatcagcgattaagctgcccttcaactctcctgtataatcataagtcatagtatctgcgccacccattccaccgccatctggtggagcggcgggaacactgctttgttcattagtgaatccgataatagggaatgtggttgtacttaacattaaagtgcttattagtgtaatgattactgactgcttttttttcaaaaaaacgcctcctactaatttcttcttgtgtcaattgtagaaggagaaccttaaatgagcctaaaaaggttgaatcattgatttttttcgaaaaaaaagaagcttctcagcttcttttgaattatgtggatgacaggaatcgaacctgcacctctatcttaaatgcggactacatcattgaacgagtaaaacaccaagttcatccacgattacaagtatagcgaatcttgtgtggatttgaaagaggcctctcagcaatttaaaaaatattatactttgagttttttctcgtattcctctgaaaattcctttgcaatgagccagccgtagctttcagtgatggcggcagcggtggagccattaacaatattacctgcaacaggaagttttccagcaaggaagcgtgcggtcatttgtccagctttttgagctagaaattgggtggcaagagcttttgcggcaccctgttcgagtttaatatgaaaaatttttcccaaagcaatcaccatagcggtttggattggtaataaaacggtggcatcaggaaaaggcaattgtgccattcctgccccaacacctgctgcggcagtggatgcgctatgaataatgaaatgggcttttcttctttgggttttattcatctctgattctccttacttctctggataattcatgtaaaaaattggattgaggcaagtctagcatttcatcacaaaaagtacaatttttcagctggttttttaagcagttttaatgattagacagtgaaaaaataaagagaaatggtcattttcatttttcgaagaatcagtagaatgataaaataaaggtgaaaggggcggcaaaaatggttgatgaatataaaaatattttagttgctgtagatggttcaaagcagtcaaaaaaggcgtttgatgaagcgatcaatatcgcgaagagaaataggggcaagttaactctggcaactgtgattgatacggctagtttcagtggaacaaccggcggaaattcaattccattgatgcaggaagtccatgaaagagcgaaagggattatcacagaactagagcatcatcggatagcagaggagcaggaagttcacctaacttctcagatcatcgctggtaatcctaaacgagagattgttgaattggcgaaaaaactggatacggatctgattgtgatgggggcaacaggattgggcgcgctttccttattactggtcggttctacaactgcttatgtggttaatcaagcaccttgtaatgtaatggtcgtaaaataagcacaaaaaaaacgcctgacttagtcggacgttttttcatctagtgtcataatcaattcatttccatcatcatagacatacatgattttaggaaattcgatctcttcgtatgcttcaacataaggtgcagtgatcccgtctgaaaagtaaggttcactttgggagtaaacgacacttaaagtacgagcaattttgtttttaaaaaagtgaaaacgttgtggtgaggtaagcggcaaccccttcatcggacgcataaaaatcatatgccatatttcctgctgcatatgttcaggaacagtattaaaaggaacctcacttcttcgtggttttgtcggttcaaacatttttctcaaccctctcttagctttatcatatcaggttttacgaagaaaaaaagtcaaagcaatcaaattcttacaaattagttcgtcgaaacagtttttttaggttaaaaatgataaggtgaaagggaacagataaagatttttaactgataaaaaaattcttacttaacaaatgaacgagggtgaaaaagatgcgttatggaattttttttaatccgaatgcaggaaatgggaatgctgaaaaattagcaaaaaaaatgcaagaaaaatttaaacaggctggacacgaaggtgaatttttgactgcccctgatcctgaaaaggcagttgaaacagtgaaagaggccattgaagagtatgacggaatcgtggcgattggcggagatggttcgctgaacatcgtggggacagcgtttgttcaagcaggaaaggcaatacctctaggaattatcccaggcggaaccattaataattttgccaaacgctggcatttgccaatggatgaagaggaagcgatggatataatcattgcagggtatcaacgtaaggttgggatcgcagcctgtcaagatcggcaaaaagctgttatcagctcttttactttcggatcgtttgcggatatttccaatgaggttcgacagagcgaaaaaaagaaattcggtttaatcgtctatcctttaaaggccttgaagcagcttggcaaagataagtcttatccggtagagattaagacggataattttcatgaaaaattggaggtctggttctccttggcgacgactactcattcaattggcggaaggacttatgtggattcagattatgatgaacttcatgtcagcattttgcacaacatgcgttttcgtaaattattccagcttattcgacttatctttacgggacgtttaaaagattcagatacgctgacgtatttagaaaccagcacgttggaattaacgcctttaacagataaaaagatttattctcgaatcgatggcgataaaggcccagctttaccgttaacagtggaatttatggcagattttgtgccgctttatgtaccagaaaataaaaagtaaaagataggaggcttttggaaatggataaaaatatggaaacattattagctaatgccgatacatttacactgatcacgattgataatcgtggttttcccaatgcaattgctgtttcaccgccgcttgagcggaatggcttttactatttcaagttctatattaatggggatggtcgaactgctgaaaacattcgacacaatcgtactggtagtctcttctgttttgacaaagacaagcatgaaagtattgcattaaagggctatttgtttgttgaggagttagttgagtataaaaaattggccgcccagctgaacgaatttcaaaaagatttgaattatgaacatccagttattgccgtttttgagaccttgagtgtcaaacactatgaaaatatgcatggagaatttctagatgtacctgagcagtaaaaaagtctctcccgtcaactaggttgtgggagagacttttttgcttaatcgaccttagctacaattgtacctgaagcttttgcttttttaatgattgtcgtgaggatgacagagaagataatacagccaatccccatggcgatcgcatacatgaacatcatgttgaaacctgctttaccaggatttgcatctagccagccaccaatcatggtatacatgaatacatctggcagataacctaaacaagaaacaattccagaaactctaccagtcagttcaactgggaaaccagcgtcatcaatgatcgcaaaatattgactgcgtactacatagattaggaataatccgaagatgaagttcgcaatgatagcggtcaaaagaccagcgctgtctggcaatatgagaaaaccagcgaagcaaagcgtcagcagaccggcaccaccaataattacacggattcgagagcccattttatcggcgataatcccaccgatgattccgcctgccgcttgaactaaataacgtattccaccaagtttcgttccacctgctacagacaagccgtacacattgattgcatacgtattgatatagcctaaaattccgtaaatactgtaagcaaagaaaacaatagccactaatacccaagttcgaggcattttcaatgttttgaacataccgatgacgattttagagagtggttctgtatgtgtttctgctgctgtgtcttcaataacaaaccaatttaaaataccaataataaaaactgtgatcgcacatactctaattgcccaagttgtccctagaatctcatttgaaaaacgactgtaaacagcggtcattccaaataccaataaggcatttaaaagtccacgtaaaccttcctgccaaccaaacaaacgtccttgttcggaactgtcacccaacattcgtgtagccttgattgcggctgaccaataggtgatgattgtagaaattcccatcaaaatgaaaataatccggctgatctgaaaacctggaaatgtcgaaaaccaccaccccaaaacaccagttgctaggaatgaaaccgtcagtaattttcgagccgagaacttgtctgcaacgaccccaccgacaaagtaagaaaatgttgccattgtagcataacctgacgagagcatccccatttgtgcattggtcagatccattgctttttggattggtacataaaaggtttcccgaatgtaaggaagctgaaagataatcccagcaccggctgaaagtagtaacaacgttccccatttttttactgcttgcttgttcatataacaccctcctgcttgtgaattgttctgtaaaaaaacgcaaaaaagaagcaacgcttaaataagcgttacttctctctgctctccagtaacacccaaagtatagaattttatgaaagcgatgtcaatgatttttgaaataaaaaagaatcgatgtgctagattctattaaatttttttagaataaagtctaaaaaatgctgatgtttcaatgtgttttccaggtttctttttttattataggattgacgaaactagcgttatccattagactgtgaaaatacagagattcaaaaagaaataaaatcgaaaaaatgaaaaaatatgctttacaatattcatagcttgtattgtaaattattgtgaacgagtttgtgatatcatctttaatgaaagcgtattaaattacttgatggggataaggatggaaatgaaaagaaaaattattcagatgatggaggacaatccattgattgctgccatcaatagtaaacgtagttttgaaaaggccttaacctgtgatagtgatattatctttgtcttgtatggagatgtttgcagtattgttgacattgttgatcgcttgaaagaggcaggtaagatcgttatggtagatgttgatttgattgatggcttagccacgaaggagacggctgtcgattatttgaaacgagccaccaaaaccgatgggattatcagctcaaaatcaatcttactaagagcggcgaatgcgcgagggttatttaccattcatcgattctttttgattgattcgaaatcctatcataatctgccgaaacaactgggaacctcaaaggcggatgtagtggaggttttaccaggagcgatgccaaaagttttatcttgggtgcaagacgtcgtggatgtgccgatcattgctagcgggttagtatgtgataaggagctagtaatgaccgccttacaagcaggagcagtggcgatttcaacaaccaatatggatgtttgggaaatataaaaaaataaaaaacggtagttgatgctaagaggacagagaaaagcggacaccagcttatttggtgttcgcttttttgttttggattattactaacggagggatacaaatggaaatcacagaattcaatatggattttttctcattagcaggaaaagtagctattgtaacaggtggaaatactgggatcggccgagcgttttcactggctctagcaaaatgcggagcaaacattcttgttccaagtttgatcgatgatgatggaacgacacaaaaaattattgaagagacgggttcctgttatgtttttatggaagtagatttgacagaagaaggggtgcctcaacaggttatagagcattgtgtcgaagtcttcggtacagtagacgtgctagtaaattgcgcaggactctatttctcagacgatgtactcaggtttgaccgctcaaaatgggatccgatgattcaattgaatttaacggcggcatttgagatgtctcatgaagcatcgaaggtaatgattttacaaaaaagcggcaaaattattaatatctgttcattgttttcatttttaggcggacagcaatccccagcgaatgttgcagctaagcatggcttagttggtttgaccaaagcttattgtgatgaacttgctggctataatatccaagtcaatggtatcgctccggggtacttgacaacggatatgatgaaaaatgaccgtgaagatccagaaataaatcaacagattttggctcacgttccggccaattactgggggagtccagcagatttgatgggggcattagtctatttggcaagttccgcctcaaattttgttaatggacatattttgcctgttgatggcggctacttagtacgttagttgtacgttaacttctaacattgcgacgaattatcttcgttgcaatgaattacataatggatggaggaatcattgctatgatcgagttcgaacaagtagaaaaaaggtatggagaagatgcgatcgctgtccatccttttgatttgacgatcgaagataatcaatttatctgtgttattggcactagcgggagtgggaaaacaacgttggtacgaatgatcaatcggatgatcgaaccgtcaaaaggcagtatcaggattaacggacaggatgtcacaaaactaaacgaagacgaactacggcgacaaattgggtatgtgattcaaaatatcggactatttccccacatgacaattcgagagaatatcatgattgtaccgaagctgctgaaatggagtgatgaaaaaaaatcgggaattgctgaacgattgattcaacgggttgatctaccgttggattatttggaacgcaaaccgaaaaatctttcaggaggccagcagcaacggatcggtgtcattcgggcgttagcagctagtcaagatattattttgatggacgagccttttggtgcgttagatcccatcactcgtgatgcgcttcaggagatgatcaaaggcttacagcaggagatggagaagacaattgtttttgtgacacatgatatggacgaggcgatcaagttggctgacaagatcattattatggatcatggagaaattgttcagtacgacactgttgaaacaatcttagagcacccagccaatgattttgtggaagaattgattggtaaacgaaaacgtaatagttattacaacaatgaaatgacggtttcagatctgatggtagatcgcgtgcaagcaatttctattagtaaatcaatcactgatgcgattcggcagatgtcagaaaataaagttgatacactgctggtagtggatgatcagtactgtttgaaaggttttgtcgatattaattttattgagcggaatatctccaagctgaaaccaaacacctctgttttcgagataatggaaacagacacggctagtgtaaatcaaaaggaacgagtagctgatgtgatcggcccattaattaatcacacgtataagtatttgccagtggtgaatgatgaggatcatcttgtgggaatcgttactcgttcgtcgttggtctcgctcgtacaggaacaattgcaataggaggtggtaatgtgaatttttggtctgaatacggcagtgaaatcttattgaaactctgggagcacttttatttgtcctttttggcaattttcttgggtattcttgttgccgttcctttaggagcagcactaactcgcttaaaaaaaggctctgaaaccgtcataaaagtggtgggggtatttcaaacaatcccgtcattagcgttgctgtcaattatgattcctttttttggaattggcaaaattccagcagtgatcgctttgtttttgtattccctcttgccgatcctgcgaaatacttatgtcgggataagatctgttgatgcgacttatttagatgctgctaaaggaatgggtatgtcgcaaatgcaacgccttttacaaattgaattgcccttagcgatgggtgtcatcatggcggggattcgcgtgtcgacagtttatgtgatctcttggacgactttagctgcatatataggcgcagggggattgggtgattatatttttaatggtttgaatctttatcgaatggatctagtgttgatggggacgattccgatcacgctattggccttgctttctgacgcattattgaaacactctgaacaaaaactgacgatggatcgagggtgagtcgatgaaaaagcgaatagtacttttagcagcaatacttctgctttttggaagctttattgtgagtaattattccgccaaagatgacacacttacggtggctggcggagtaacttcagagtcgcaaattttaggcaatattgtggtggaactgctgcaacattcgaccgaccacaatgttgtttatctaaataatttaggttcagccaacttaatgcatgaagcaatgttgcgaggcgatttagatatagcgccaactcgttatactggaacagacctgattggaacccttggattacccacggaaaaggagccggataaagccttagaaattgttcaacgagagttcgatcgacgctttggttttgactggtttccaagttacgggttttccaatcaatttacgtttatggtaacgcaagaaacggcgaagaagtatggcttaaaaaaagttagtgatttaaaaaaatgtgcaagtaaaatgcggttaggctccgaccaaacctggtataaacgagaaggtgatggatataagggatacacggaagcctatgacacgaaattccaacgagtttatccaatgcaggtgggcttgctttatgatgctttagttgctaatgaactggatgtgattttaggctattcgaccgatggaagggtcggtagctatgaccttgtaatgctagaagacgatctgaaatttttcccgccttatactgcgagtgtcgttgtttcgggagagacactgaaagaatatccagaactcaaaccgatcttgttgaaattacaggacacgattgataccaaaacaatgcaacagctgaattacgaatcagataatgaattgttggagccgaagattatcgcacgtcgttttttggagaaacataacttttttgaggagggaagctaatgtttgacaatttagtgacatatttaagtgagaactcctcgtacctaatcacacaattcggtgttcacgtttatatctcagtaattggtgttgtgttgaccttcttgattgggtttcctttaggaatagtattgtctgaacggccaaaaatttcggatatcgtaatcggaattatcaacgtaattcagacgattccttcaatcgcgatgctgactatgttattgatcttgatggggctgggacaaaatacagtggtggcaacagttgttttgtattcgttattaccgattgtgaaaaatacttatgttggattagtcaatgtcgacccgatgtatattgatagtgccaagggtattgggatgaatcgctatcaaatcttgtatatgatcaaaattcctttggccatgccggtaatttttgctggtgtgcgcaatgcgttggtaatctcagtcgggatcacgacaattggttcatttgtcggtgcaggtggcgtcggtgacgtgatcttgcggggaatcgcgatcacggatggcggaccgatcattattgtcggcgctgttttatgcgcctttatcgccatgatgatggattggctgtttgattggatgatgaaataaaagaagacggtcgcgattattagcgatcgtcttctttatttatacttaactttcgaacaacttcctcgatatacatcagcaggattgtccgcgttttttcatgagattttagttgttcgtcttgatgcgacttggttaaaaagataatctcactggcatctaaagataaattcgtgttcatttcttccatcaccagtaaggattttgcatggtgctttttggcttcctcaaacaagggatcaaagctggcgaatttcccagcaactgaaaagattagcagcaaggaattctccgtcaataaatctggaattagtgaaggttggctgacgcggatgacatttttgttcaaggtaaaattgagcttgtattcaaagtattccatacagaaattggtcgggccatagccaaaaagcaggattttctctgattgctggatgagatcggctagatagtcgaccgaggattcgtcgaaattctccatgaaattttgaatacgtgcaaactcgctatttaatttcttctgtttgattaattcttttccggtcagaaaacgaaaatattctttatagccggaaaagcccattttcttaaccagcttagaaatcttcgaaggggaaacctccgtcagtttcgctgcttcggtaattgtcaagtttggctgagactgactttcttttatcagacggttatggatttttatttccaaatcgtttaaacgatccaattgaattttcattctgaatgggctcctttacattctatgccttgacagtagaatagcatagtctatttaaaaaaagcaatcatcttatggaaaattttccaaatatataaataaaatcgcaaaaacatagaaaatctaattaaattttaatgtaaaatggtttttagccctttatactgaattcaagaaaagcgctttctaaaaaagatgaatggagttaattgaatgaattctgaaacattggtgaaagaagcaattatcaaagatataaaaaatattgtttctgacaaacaagtcgtcacagatcacgagactttatacgacgcggcctctgaccgttatcgtaaatacatgaaagcaaaaggtgttttagataatccgctgccgactgcagtcgtttatccaaacaatgtcgaagaagtcaaaaatttattgatgtattgcaacgagaacgatatcaatgtgattccgcgaagtggtcagactgcgactgagggtggcttggaaaactggaaggacttggcattagtgatcgacggttctcacatgaataagatattgaaaatcgatccttataacatgcaggcgactgttcaagcaggtgtgccgctgcaggcgttggaagatgagttaagaaaaatcggctacacgacaggtcattcgccacaatcaaaaccaatcgcacaatatggcggattagtcgcaacacgttcaattggacaattttcaacgttatacggcgggatcgaagatatggtggtgggacttgaatgtgtcttcccgaatggtcacatttctcgcatcaaaaatatttctcgtcgtgcaggcggtccagatattcggcacatcgtgattgggaatgaaggaacgctttgctacatcacggaagttacggtgaagatctttaaatattatccagataataataaattttatggctatctagtaaacgatgtagaagatggtgtaaaagtcctgcgtgaagtaatggtcaacggttatcgtccatcggttgctcggacctattcgccagaagatgcgcgtcagcatttctatcatttttatgaaggaaaatgcgtcttgatttttatggcagaaggacctgcaggaattgtcgaggcaacgggtaaaggaatcgaagaagcggttgaaaaattcaaagacggcatcgtcaagcaggtcgattctcaattgatcgaaaactggtttaatcaattaaactggacacaacaaacgattgacgatgagatccaaggtatgatcgacaacgacaagcacgacggctacaccaccgaagtttccgcagattgggaaacaattacgaaaatctacaacaacgttattgatagaattcgcaacgaatttccgcgtgcgaatgatttaactatgttgggcggacactcttctcatagttatttgaacggaacgaatatgtactttgtttacaactacgagattaactgtgaaccagaggatgaaatgaagatctaccatcatccgattcaagcaatcattgtggaagaaacactgaaattaggcggttcgatgtgtcaccatcacgggattgggaaatatcgaaatgaatggacaaaagaagaacatcaatcggcgtactacatgctagaaaccttgaaggaagcatttgatccaaaaggtgttatgagtttcggaaatatctacccagttcaagaaggctataagtatcagaaataaatgatttgttcaagggcgaatctttgcccttgaatgaaaggataaaaatatcagttctgctgttagcagtatatagcgcacaaagcacgctaaaatatatgtcaagctaaatgcaccaatcgaacagtgtagcagaatgatatacggcgtgaaaaagaaactaattttttggaaaaaaattaatccattaaaatgaacaaggatgtcagttctgcttttagcagtatataacgcacagagcgcgttaaaatatatgtcaggcaaatgcaccaatcgaacagtatagcagaataatatacggcgtgaaaagcaaactaattttttggaaaaaaattaatccattaaaatgaacaagtgaacaaggagggcttgaatgaaaatcatttgtttagtcaaatttgtgccagatacggagaagtttgaatacgattatgaaacggataagatcaatcgtgagacttctcgtatgattctaaatccagatgataaaaatgccttggcatgggccatgaagcagaaaaaacaagatccctccacatttgtagaagtcgtttcgatgggaccgttgaaattggaagaggaaatgaaggattttgttcgcttaggtgctgataaagctgttctgataagtgatcgacggtttgctgggagcgattcgctggcgactagtcggatcatttccagttatttggcttcacaagagtataatgtattgcttactggtacacatactttagatggaggaaccggacatattggtccgcaaatcgcagaaatattgggattgaatcagttttctaatatcatcgccatcaaagaagtgaagcaggaattttcgattgtggaggctttgcaggaagaaatgacttaccgtttgaaaattcaaaatcccagtgtattaagtgtgacgcatcaaatgaacttgcgtttaggttttgtacgttatgaaaatatcggtagaaacgtggatgaccaatttgcattggtagataatgaagttttgcagttgccggcagagcagattggcggtaagggctcgccaacgaaggtaagaaaaaatatcgtggtaaaacgtaagcaggtagaacataaggtagtgaaggtcgacgacgaaggtatcgatgaagtggtttgttttctcaaagaaaaggggtacttataatgtttaaaggactcattttgattgataatgaaaatataaactactcattggacttgattgatgtagtgagacgtttggccggcaatgaagaagcctatatttatggtttaggaatcaatttgtctgaaaaagttaaggggcttgatgcggtgatcagcgttgaggcaccagctatccaaatgaaggatagtcgcgtattgacggatattattcagcaagtccatgaagaatatcaatttgacagcattattattctcgcaacggattttggacgaatggtagcaccacgtttggcgatgcggcttgaggtaggattagtggctgatattaccgatatcgatgtcgacaaacgtgggaagaaattgatccggccagctttttcaggcaatatcatggcaagtatcgtctgtgaatcctcaccgatcatggctagtgtccatccgaatgtttttcacacagaagacttgagtacagaaccagagatcgtcaaatttataccgacagatttgaaagcgtcatcaatcgaagtgcttgaaattatagagagtgaacagacggcaacagatattcgcgaggctgacgtgattgtttcagcgggcggcggttttacccagccgatcgaacaattgcaggatttagcgaaggaattgaccggcgttgtcgccgtatcgaaacagcttgtggatcgtaaaaaagccccgcgggaaatccaagtgggacaatcgggcaagactgtcagtccggaactctatatcgctttagggatttatggatcaactcagcatattgaagggttaaaaaatgtaaaagagattatttcggtgaatacggatcttggggcaccaatgaattatttagccagcctcgtcgttcatggcgatgcggcggaatttgcaaggaaactaagtaccaaacttaaggaataatcccaatcgggtaaaaaaataaaaggaaaagaaggtaaacaaatggaaatcaaagactttaagatggacatgtttcatatcaaggggaaaaatgcaatcgtaactggagggaatactggactagggcaagcattctcattggcattggcagaagcaggcgcaaatatctttatgccgtcaatcatgccagatgatccagaattcaatgcgatcttagctgaacgtggcgcgaaaacggcatatatggaagcggatattaccaaagacggcgtatgccaagaagtcgtcgaaaaatgtgtagctgaatttggttcggtggatattttagtaaactgtgccggcatttgcccatgtgatgatgtagtgagctatggtcgtgacaaatgggacccaaccattagtatcaatttgacagccgcttttgacatgagtcatgaagtagcgaaagtaatgattcctcaaaagagcggaaaaatcatcaatatctgttctatgttctcgtttttaggaggacagtgggcgccagcatatgcagcttctaaacatggtttagctggtttgaccaaagcttactgtgatgaattggctcaatacaatattcaagtaaacggtatcgcaccggggtatttcaagacccatgcggcaaaagcgtcgatcgaagacccagaacgcagcaaatggatcgtggatcacacaccagaaggacgttggggagatgttgcagatctgatgggtgccacagccttcttggcttcggaagcctcacatttcgttaacggacatatcttggctgtcgatggtggattcttagtacgatagtttatctatataatagaagaaaaaatcaaaaaggagagactatggaaaagaaatatatcgtcggtattgatggtggaagccagagtgccaagatcgtcatttttgatttagaaggcaatatcgtgggtgaaggaaaagaagtattgcgtccgatgcacttaggtgatgatgtggttgtggagcatcctggtgatgatttatgggatgcgttatgcagtgcatcaatgaaagcgatggatgaatttggtattcggaaagaaaatattgtgggaatcggcttaggttttatccgctgctgccgcgtgcttttgaaaaaggatggtacattagctcagccagtcatcagctggatggacaaacgtacgtctacaccttatgtccatgacaatcctgaagttcaatacgtgacgtcaacgagcggatacatcacgcatcgtttgacgggtgagtttaaagataatatcggcaataactttgggcaatggcccgttgattatcagacatgggactggtcgacagatgaagaggtattgaaacaatacaatcttcccgaagacatgttatttgaaacagtgaacccaggagatcaattaggaacaattacaaaagaagccagtgagaaaacaggcttgcctgaaggagtgccagtttttgcgacaaccagtgacaaggctgttgaggcattaggtgctggattgattcaggattcaagcgcgttggtatctctagggacatatatttgcagcatgatgatgggcaaagaaatgcctccgagtgatgcggtcaattattggggcatcctatcctcaatgccgaatcgctatatttatgaaggctatggtattcggcgtgggatgtggaccgtctcttggttcaaagatcttttaggcgagaaaatcagtattcgttcgaattatcaagggatcagtgaagaggaatacttgaatgaacaggctgccaatatcccagcgggcagtgatggattgatgacgaaattggattggttggcgaatccttgggagccattcaaacgcggtgtgatgatcggcttcaacgctcatcatgactatcgttatttataccgttcgatcttggaaggtattgcctacacaatgaaaaataatgtgactaacatgacggacgaaatgggccatccaatcgacgaagttatcgtaactggcggtggttcaaatagtgatttactgatgcagatttttgcggatgttttcaatttaccggtcaaacgaaatgtggtgaacggtagcgccagcgttggggctgcgatcaatgccgcagttggcttgggaatctatgaaacctatgaagaagctgttgaaaaaatggtaaaagtaaaagatgtgttcactccaaacccagacaatgtggtggtctataaacagttaaatgaagaggtttatcagagtttgacggattacaccgatgaagtgttgaagaaaacctatcatgtattgcatccagaaggctaattttttgatatatagtgtgtaatttacgaagaagcggttccgttcaaaagggaattgcttctttttattataagtagggatgcaagcatatctgaaatatggatatatttgtgaaaaacagagaaataaaagaaacgaaatttctcaattaagaattatttttaaaataacacatttgctagtgattcgtatcctcaaccctgatataatagaaaaaatatttacaaaagggagagaagcaagtggataaaaaggcgttaaaacgattgatcgatgtagcagcaggtcgtgaaccggctgatttagttttaaaaaatgcaaacgtgatcgatgtctatcaagcagagatgatttctggtgatttagcgatcattgatggcaagattgcagggatcaatggggagtatcatggtaaagaaaccatcgatcttaaaggaaaaattgtagcgcctgggtttattgatccccatatccacgtggagtcctcttacgtgacacctgaggaatttggtcgcttgctggtccctcacggaacgacaacggtgctagcggacccgcatgagattgttaatgttcttggcctgtcaggattggattatatgatagaggccgcaaaggaaacggcgctggatatacgctatatgatgccttcatgtgtaccggctacgaatatggaaaatgctggtgctgtgatagaagcggcagatatgatctcttcctttgaaaaaaatcaggtagatggattagcggagttcatgaattttcccggagtgatccacgctcaagatgaggttctggataaactattagccgcaaaagaacgaggattgcgaatagatggacactcgccgatggtttttaatgaagaattaaatgcctatgctacagcgggtatcgccaatgatcatgaatgctctacagtggaggaacttaaggatcggattgctcgtggaatgtatgtcttcttacgagaaggatcagttacgcaaaatttacggacgctattaaacggagtaacggataataattatcagcgttgtgtcttatcagcagatgatctgcaagcgaaaacgatactagaaaaaggacacttggacaatagcattagaatttgtattgaagaaggtgtttcacctttgagagcaatccaaatggcgaccatcaacgcggctcaatgctgccaattaacagatcgtggagccatcgcaccaggcttaagggcggatttagttatcttttctgatttggctcagccagaaattgaagcgacctacattgaagggaagttagttgctgaaaaaggcacctatctaccaactgtgaaacgaatttcaacggaaaaggtgcaatcaagtgttcatatcgacaagtttcgaaaggaacagttgaagttgaacctgactagcgataaagcacgggcgattgaagtgattccgcaagaagctttaactaatgaagccattgtttctgtgaaaagagatgaccagggtcagtttgtttttgatccaaagcaagacgttacaaaaatcgcggttattgaacgccatcataatacaggcaatgcttttgtgggattattgaaggggtatggtgtgaaaaaaggtgcgattgggctatcaattgcccatgattctcataatttgattgtaactggaacgaacgacgaagatatggcggcagccgttaaaaccctcaaagagcaagaaggcggcgtagttctgattgaatcaggaaaaatcattggtaatatggcgttaccggtcgcaggactaatgagcgatctcactggtgagaaagtagcccagcaagaagcgaaaattaatcgactagctcatgaagtattaggagtttcaaataacgttgatcccatcatgacattaggctttatgtctctagcagtcattcctaatttaaaaattacagacattgggttagtagatgtaacgaagttcgaaattgtaccggtctcggtagaagcataaaaaaactaggacaaagattcattcgcgaatctttgtcctagttctatttttttgctcttgaattgtcaaatcaagtgcaacactttattaaagaagacttcataaggtgttttccaacctagacactttctaggtctgctatttagtttttcaaccatccgataaatcgttgtgtcatctaccgtgtccatctctttcgattttggtaagtattctcgaataagaccattcgtattttcatttgttcctcgttgccatggggcatgcggatctggaaaataaaagggcacattattcaatgcttctgtaaccgcgaaatgattggagaattcttttcctctatctggagtgatcgttttaaccacctcattggggatactgcttaaaagttcaatcattttttcgctcacgtaagcagcttttttctcggcgcttttcctgctaaaaggaatcgcgattttcgatctgtcaacgtcactaaacaagcaccaccagtttttccagctacagtatcggcttcccaatggccaaactcacttctatcgtctgcggattttggacggtcatggatcgaatgcgtaatgcgtatttttccacgagtctcgacgtgattttttgtatgccttgtttttcctcgatgacgtaatgaacggatcagtcctctattgccatgggagagcggttctgtatcgaaaataccgttgtaaatggcacggtagatcgtgataaaactgatggagaaatccgcatgttcgaacttcaagcggttagaaatttcttctggcgaccattgaaaatcgacaaataaatgacgaacgattgaccaaattcgcggatcttttagaaggttatgacgtccgcagttttttcttcgagaagcatactttttgtctgctttggaaggggagtaggttttctccttgtttcttctcagttcacgtgaaatggtagacgggctacgatgaatgtcatttccaatttttctaatagaaacaccttcttcgtgaagtagaaagattctttctcgttcgagtatggtaagatgatgatactggctcataattatcttcctcctagtagtgttctcgacaaacctattctagttggatattgattatgagtcattttttatgtgttgcacttaaagtgtaaattcaagctttaaaaagtacgggtaagaaaatgaagaatgaaagaattagtacgctcgctccaactgtcattattagttttggtaaacctagttgcgatataccagaaaaattaccaaacgagtttcctaaaacaatgacgaaactgattagcatagttgaaaggatcgccttacctcgttcaccgcgtttttcaaagtagctaatcactgaataaagtccccagcccaacaaaacaatcgtaaatgtatccataaattccaactccctttctttgatgtattcatcatatcaaggaagtcgaggctaaaatacttacaaaagcagtgatggacttacgattgtgaaaggttgaaataaatggtgaaaaaaaactagagccaatgcgataagtaaaaacgctgcctacttctcttttaaagaaaagtaggcagcgttttttaatctaatacttcaccattatcgccaatggaatcgtctgaagtttccccttccggtttttcataatggaagtttgatgtatcgtatttgaagttgtatttatttcctaagaagtacttcgcgatgtgtaatgtgcgatcgctggaacgttcaaggttagagctgatatcgatcagtaaaacaccatctgcggcacgaccttcgcccttggtcattaggcgaatgtattttttacgcagtaattctacgagttcattgatattttcttcacggtctaacattttttgtgcaagttcgatatcgtcattttctaagacttgcagggcatcgcgtatattttttaacactttatcaaaaagcaattcaagatgttcatcgtgaagcaagaaggtctcacggttgctattggatttggttcgattccgcttatcttttgctcgttgtttctcctcaagagcgattgattcctcaacgtagcgtataatattcattgaatgatccccgatgcgttcgaaatccttagtgaactccagcagcattgcttgttcttgactttccaatggtgtaagaacagtcgcagagattttgactaaatattcggttagttcaatatcgcattggttgattgcatcttcgtattgtaaaacatcatcgcgccattcttcttttgtatcgttatagtatttgcgcgcagactttactgaagaaagaacgtagcgccccatttgaatgacttctcctttggcttgctcaatcgccataactgaagatgtatgaatgattggttcactcaaagtgacagaacgaatatttaaattcttctcactaccagggacaatcttcttcaccagcatttcaatttgagggatgaaccagaattggattgctaaatttgacacattaaaaagcccatgagcgaaggctatctgcatggcaggattcaatcccaatgaatttgcgaataacataaccagttttgtaaatggtgacagtagcaaggtgaaaataatcgcacctacaaggttaaaaatcacgtgagaggctgcggttctctttgcggaaacactggcgccaagacaggcgatgatcgctgtaatagtcgttccaatattatctccaaagaggattggaagtgcagcagttagcgtgacgctgccttgcatgtacaattgttgtaaaataccaatcgtggcacttgagctttgtagaaccatcgtcaagagcgtaccgataccaacacccaagacaggataatcagcaacactaagcattaattgattaaattgcggcaaatcttttagtgggtccatagcagttcccattaattttaaaccataaaaaagagcaccaaatccgaataagatctgcccaattgattgtaaagaggttcgtttcgagaaaaagagcaaaatcgcccccgcgccaatgatcggcagcgcatatgcacttaaattaaatccaataataaaagcggtgacagtcgtccctacgttcgcccccatgataactccgatagcctgtcgtaaggtcataaagccagcgctaaccagtccaacggctaagacagtggtacctgagctgctttggatcaagccagtcacaatgattccggccaatacagcgcgaaaaggggttgaagtgaagcgatttagaatttctcttagtcggtttccggcagctttttgtaaaccatctcctaaatatttgatcccgaaaaggaaaattcctagtccacctaagaaggtgaaaagcatttcttgataagacataatgcgtcctccgctaattttttttgcatgctactaccaaaataatagattcacaagtaaaaagaaagtcttttatttaaaaaagcgctatttttttgaaaaaaccgatttattttgtcggaattgaaataaatactagatgaagcagttaaatggatggaattcttttgaaatttttagcgctttcagctactcttaaagtagtaagaagttttttcaatcggaatggaacgcgcattttttataaatagaggagatgtagtcgaatgctttatggaaagaaagatcgacgcgaggcaagttacttggaaccgatttttggttcagtgaatgaagatgaattattaccttcttatcagttaggtgaaaaatcaattgagccgcgaattgcataccaaatgatcaaggatgatctattagatgaaggaaattctcgtttgaacctagcaaccttctgtcaaacctttatggagccagaggcagtcaaattaatgagtgagacactggataaaaacatgattgataaatcggagtatcctcggactgcagaaatggaaaatcgttgtgtaaacattattgctgatttgtggcatgcgcgaggaccagaaaaatacatcggtacttcaacgattggctcatcagaagcctgtatgttaggcggtatggcgatgaaatttgcttggcgcaagcgagcagagaaactcggggtgaatatccaagcgaagaaacccaatctgattatttcttcaggctaccaagtttgttgggaaaaattttgtgtctattgggatattgagctgcgagaaattccaatgtcagaggaccacttgtcattggacgttaaaaaggcgttggaagctgtagatgaatatacgattggaattgtgggtattttaggaattacctacacaggacaatatgatgatatcaaaaaattagatcaattagttgaagaatataatcagcaaacgcaacacaaagtctatatccatgtggatgcagcttcaggtgggctatatgcgccatttgtcgaaccagagctagaatgggattttcagttaaaaaacgtgatttctatcaacacttccggacacaaatacggcctggtctatcctggcgttggttggatcgtttggcgagatgaaaaatatttgccggaggagttggtttttaaagttagttatctaggtggagaaatgccaacgatggctatcaacttttctcacagtgcagctcaaatgattggtcagtattacaatttcgtacgttttggttttgatggttatcagagcatacatcaacgaacgcatgatgtagcagtttacttagcgaaagaaatcgaacgttcacgacattttgagatcatcaatgatggtagtcaattgccgctagtctgttataaattggcaaaagatgaagcgcgcaggtggacgctttatgatttatcagatcggttattaatgaaggggtggcaggttccttcttatccgctacctaaaaatttggagtatcaagttattcaacgaattgtggtgcgcagtgatttcgggatgaatatggcttatgattttattgaagatctgaaggaagcgatcaaagaattagaaaatagtcacttagtttttcatgaagagactgaaataaaaaattatggatttacccattaattgaatcagaggaggcgttacaaatgaaagtcgtttttcatgttgatgagttgggaatgattagagaggcccgtcatgatatcgagcatatcctgttgtcagagccagatgcggatatcgtactattgatgaatggtgaagcgattcaaggatatttactgccgcgagtgatcaagtttatgaaggagtatccgaatatcacttatcaagcctgtcatcattcgatgcgcacattccatgtccgttcaaaacaaatgcacgatcaagtggagatcattgaatctggagtgatcggtttagtagagttgcaggagcgtgggtattcttatattaagtgttaaattatcgatcaaaacgtaagtccttccaaaagaggggcttatttttttactttcattagtaaagagttgcttcaaagttaaagatcccgtgtttgttattctaaaatatgaaatagggtacacctactattgaaataagttattttattaagtagtatgcaaactgtaactttattatttaatacagatttaataacgagagaattattcattcagtctaattttgcatgtttaatttgtaaaagttgccattttaagtaaagggcttacattgtatagtttatttgtaagcgggaggtagttatgagacaagaaaaaattgttgaatacttatatgcaaagaagcaagcgattgctcccagggcattagccgctaaatttcaaatatcagaacgaactttggcgaatgatattaaatggctgaaggaaatcgggtcaaatgaaggatttacggtcgaacgggttcgttcagcgggctatcagttgaggattctcgacaatgttagctttagaagctatctgtcgaaatcgaaaaagcaagaacaggtagataattccagtccgcaggagcgaattaaaaatatcgagctattgctactgttccatgaagagtacattacgatgcagcagattgcggaatggctggatgtcagtttgtcgacgatcaaagcggatatcaaacaggtcgaacagttttgtgacaattatgatctgacactctttagtaaagcccattacggcttgaagatcatgggtacagaaagtaaaaaacgacgagcaatcttatacttaattcgtaatacgattcatacaccggttttgacggaaaagtacaaggagttcaattttgtcttcaatgaagaagagcttcggcagcttttaaaggagcaattgttagaaaatcaattgaagattagtgatatcgtttttgaaaacatcgttcaacatattcgcttattaagctttcgcatcctgcaaaacaataccttgaacagcgaagagttggaggagcgtacaattagcgatgactatgatcgtttgacggaaaaattagtcggctatttagaagagacctatcagttgaatttctcgtgtgtggaaaaaaattatttagaagaacaactgcgtgggaaatttgctgttttagatgatcctgctagtaatcagcaattgagacaggcaatcgataaatccttggaattggtggatcgacgttatcatacgagctttcggcaggatcaagatttagccaatgcgttaatgatgcatgtagccccattattgcaacgtctttacaccggtcatcagctggaaaacccgattattgaggatatttacacgcaatatgccaatgtatttaatgtagcaatggtctttatcaatgaactgaataaagacttagatgcggatatcagcaaagatgagattggttatgtagcgatttatttcgcggcgagcttggaaaaacaatctaatcaagtgattgatgactatcagaaaatagcagtgatctgttcgacaggtggcggggcggcttatttactaaaagtcaatttggagcgattgttcagtaatgcgaaggttgaaacatttgccctcaatgaaattgagcaaattgatgctagctttgatcttttaatctcgactgtaccgctgaagcaaaccgattttgggataccgatcatttacactaaaacgattttaagtcagacagagatcacaaagattgaaaaagatttgtacctgttaagagaatcgaaaaataaagtctttgatgtacaccaattcattctcagtttatttgatgaggaatggtttcagattaatgaagaatctgatgattatctggagcttttggaaaatgaaggtgctcatcttgaaaagtgcggctgggttgagcgtggctttaaagaaagtgttttaagtagagaaaagatgattgatacgatttatcagcaaggtgttgcagggccccatccgatggagcaggcagccatcaaggaagtcattgatgtgattttactgaaaaaaccgctgatttatcgggagaaacaagtaaggatcatttttctaatcaatatcaaaaaggatcacttgagcctgcataaagaaatcagtcgtttaatgatcaagatgatggatgatccacttttagatacgcaactaacaaaaatgacgaattttcaagacttcaagtcttatatgaaaagtttaatgaaagaaggataaaacaatgaccgatcaagaaatggatatttttaaaattatttccgcagcaggagattcacgaggttctgcttttgaagcgctacgtctcgcccgcaaaggaaaattcgaggaagccgaagcgaaaatgcaggaagccaaggaaaaaagcatcgatgcacatgatgtgcagaccaagttgatcaccggtgagatcaatggagataaaacggagacgagtttactgatggtacatgcgcaggatcacttaatgaccagcattctggctcgagatttgattgaggaaatgatcggtatgctaaaggaacaaagcgaagccaaggctttgcaataagataaaaatttattaggaggatttaacacatgaaaacattactcgtttgtgcaggtggcttttcaacgaccatgatgatggagtcaatgaaaaaagtagtcaaggaatcaaaaagtttagatgaaaaggattatccgatggaagcgatcggtgtcgataagttagaacgttacatcgatgattacgacgtgattttagtcggtccacagttgagccataaatatgatttcattaaaggagaagctgacaaaagtaataaaccaacagtgttgttaacgtcagatatctatgggtcaatggatggtgccacggttatgaagcaggcattagtcgcatacagaaaaaatcaagcattaaaaataaaatagttaggagtgtaaaaaatggaaaatccaaagaaacagggtgccttcgaaaaagttgaagcattcattcgtaagacactggttccaattgcgaacaaggttgacagcaatccttacttaacggcgattaaaaaaggaatggtcgttatgacgccagtgctgctattgggttcgatcgcggcgatttttccgtcgattccagagtttatcaaaacaccaggcgttgcgagttggtttgaaaattatgggtatatctttggcattatttcaaaagtttcattaggtcttgttgggttgtatgcggtattggcgatctcttattttttaagtgaacattacaagctgtatacagttggttctatgatgctatcagccatagcttttctaattgttgcaatggatgttgacgacaacggcaatatcgttgctagttatctagattcaaaagggctctttactgccatattcgtagccattatttccgttaaactctatcagttctttacgaagcataaattggtgattaagatgccggaaggggtaccggattttgtctctagttcattcgaattgatcacaccaaccgcagcgatcggagttttatttattgtgattcgtgcggtgacagacagtctatctggtggggttttactcccacaagtaatcatggatgttttagcacctgctattggcagcttggattcattgtggatcatttactttgtattagctttgcgtttggttttctggttctttgggattcactcagccgtattatcgccgatcttatcaccaattgcggtacagtatttgtcagaaaacattgcggctcatgaagcgggggaaccactacagcacgtaattacaaatggaacattgtcagcttttgcaaacttctcaggatcaggcgttacgattgggttagttttagcaatgctgatcagtaaatctttacgctataaaaaagtcggagcagttgctttgctgccttcactgtttgggatcaatgagccggtgctcttcggtgtgccgattatcctgaatcctgtgttgatgattccatttattttcggcggtgccttagtgggaatgtttccgatgatctgtatgaagcttggtttattgaactttccaatctttgatccgccgtatgttccagtatttatggagggatttctgactggttttgactggcgtgcgatcattattcaagtgattcaggtggcaatgtcctttggtttatacttgccatttttcaaagttttagagaagcaagaattagaacgtgaagcattattagaagctgaaaaagccaattctgtcatttcagatgacgatgaacaatatttaaccgatattgatttctagccaaaaaggacagcttggactgtcctttttgctttaaggagcacaacgaatgaaagtagaaaaattacgtagaaaattagctgaagaaaaactagatggattactggtaacggataaaattaatcgccgctatttatgtggctttactggatcgaacggtcttttgttagttactgaaaatgcgctgcacttatttattgatggacggtatacgcaacaggctcagcagcaaacgcaaggggtcgaaatttgtgaaattcctgttggcggcaacataattgaagtattgcgacctttttttaagggttctgtattcggttttgaagcagggacgattacttatcaaagctttattaattttcaagctttaatgggggcagtcggcggacgattagttgcaacgaagaatatgatcgaagaattacgcatgctcaaaacaccagaggaactatcagcaatcagacaagcggccaaaatcgcagatcaaacattagaagtgattttaccattgattcgtacagggatgaccgaattagaattagccaacgagattgactatctcagcaaaaaattaggcagcgaaggccccgcctttgagacaatcgtcgcttctggcccacgaacagctttgcctcatgcccatgcaagcaataaaaaaattgagggcaatgaattgattatgattgattttggtttaatctatcaaggctattattcagatattacacgaacttttgcatttggcgaagtagccaacgaaatcatagaaacgtatcaaaaagttctaagcgctcaaaaacaagcgattgagacagtcgctttagggaagccattaggagaaattgatcaggttgcgcgccttgtcttagaacaagaaaatctggttcagtatttcagccacaatcttggtcacggaatcggactatcttgtcatgaatatccagccttagctccaagcgaaacactattaatcgaaaaaaatatgagctttaccattgaaccaggagtgtatttaccagagaaggcttttggtattcggattgaagatgacgtcgtggtaaacgaatcggggcacgctgaaatcctaacgcattttaacaaggagtggatgacaattgattgcaaccgataaattattgatgcaattatctgacttagatgcattgccaggacaagaagcgcaagtccagcaagcattgcaggaaacgattcaaggtccggtaacaaaggactcatttggcaatctgtattttggcgatttagagaccaaaaagaaaaaaatcgcgctctatgcacatatggatgaggtaggatttttcgttcaccatatcacggaagatgggttcgtctatttttacccaattggcggttggtgggggcatgtggttttaggacagcaggtcagggcaacatgtcgtaaaaatggtgcaattttggaaggaatcgtggggtcgttacccaaaactagccacaaactgacagaggttgtgccgatcaatcaaatgtatattgattttggtgttcattcaaaatcagaattagaagaagcaggtatgcagatcggtgacatgattttaccgaatacaaaagcaagaaaaagctttaatcagaagaagattatgggtaaagcgttggatgatcgagtggcatgtacgatcatggcgcaagtcaaaaatcaggcagaaacaaagaagatcgaagtgattggtgtagggacggttcaagaagaagcagggactagagggtctaaagtcgctgccgctcaagtggatgcagacattaatattgtcattgatgttgccaacgggaaggatacaccacatgctgcagattttccaaatcgtatccaaggaaatggtccaggcttggttttagcagataaaacagcgctaggaaatatcaaattattggattactgtaaagaaattgctgaaaaaaatcatcttccatggcaatatgacctacttggcggtggtggcacggacgctggttccgtccaattatttgctggaaagccaacattggtcttctgcgtacctgttcgttattgtcattcatggaactcgatagttgaaatttctgatgtggaagcaacgattgatttactttcagcagttatccgttcattagacgaaggaggaattgagcttgagcaattttaatcaacagcgttcgcgatacggtacgtattctacccaatgggattatgttcaagatcgctttggcgaaaaagatctattgccattttctatttcggacacagattttatgcttcctgatggtacggtcgatgttttaaatgaagcagttactcgtggcttcttcggctatactcgttggaatcatttggattataaacaaagcatcagtcattggttccgacaggagtttgattgttggatcgaccccgaatggtgtgtctattctcccagtgtgatctatagtctgtcggtatgtatccaattattgagtcaaaaaaatgataaaattatcaccttaactccctgctacgatgctttttttaactgtatcggcggtaatgatcgtgaattaatcactttttcactaacaaacgtcaacgaacagtttacgattgattttgcggcactggaaaaagtttttgcaactgaaaaaccaacgatttttttattgtgcaatccccataatccaactggtcgagtatttactcaaggtgagcttacccgcttgattttcttgtgtaatcagtatcaaattgccatcatcagcgatgagattcatatggatgtgcgtcgtccagaaaaaaaacatttgccgatcttagcatttatagagaaaatagagactccagtggttttattatcttcagcgtctaaaaccttcaactctcctgggctaggagggtcttatggatttttttttgaagctgcattacgtgaagaattcttgagtattttgaaggggcgtgatggcttatcttcgattccgtatcccgcattgcttgcgacgatggattgctataacaatcagaaaaaatgggtggaagagttgaatcagaccattgatgccaatttcttagagttgaaaagaattcttgctagcgattcacgaattcaatttgagattcccgaagctacttatcttggttggatcaatattgagcaattaccttatacaatggaagaactacaaacagttttagtcaaacaggaaaaggtagcgattatgaaaggagagacttacggcccagagggtgagaggtatcttcggtttaatttaggtgctccaaaagaaaaaattattgatggcgctgtacgtttgatgcgagcaattcaaagtttagatcaaaaattctcttaatttcttcccttcatttgttaaaatggagtaaaagtaaggatgattctaattagcacagccattgtaattctccatgaaatctatggcattaatgatttcatgctagatcaaatcaagtattatgaacagaggggcttcactatttattgccctaatcttttgaagcgggcctctttttcttatcaggaggcggaacaggcatacgagtattattatgctcattattcggagatcgaaaatttcactttcaattatattgagaaaatatctcagctccatgaaacggtctatcttttaggcttcagcgttggcggcacacttgcttggctttgtagtgatgggctggagtgtacgggtgtgattgcctgctatggttcgcgaatcagagaccatctacaaattatgccaaaattccggacattgctgcttttttctcaagaacctgctttttcaatagagaaaacagtgaaaagtttagaaggaaaacagaacacaactgttcgtctttttacggctaagcacggttttctagattcctattctgcaaattatcatcctgagactgcaaaagcggcacagcaggaaattatttgctttttgaatgaaacatttgagtaggtaaagtaaaagcagagaagcggccaatactccttggcttacttctctgctttttcgttccatttttttggactccaaatatttccctctaatgcgacttgtaaactttcattgtcatcttctaattgttcgatatatttaactgcctcatcgatgataaattggtacttctcatcagaaattgcagtcaattgttcctgtaaccatgtatttcgcatttacttcacctcaaaagcagtgtagcatagaattagtcgatatctcgtgtgggatgcttgggaggaattttacaatgaatataaatgaaagcgttcttattgaagcgaaggcagaattagctgcagcaaaaatcgaactggaacgattagagcatttaactttttccagtgagttgaaagaagagcggattaaatcactaaaacaagaaattcaacagacagagcgtttgttgaatacgcaagcagatatttagccttctcatttcttcgatggtagaataattttagagatatttggtgcctattttatcaatagaggaggatttgttatggcaaataacgacgaactaaaaggtaaagtgaacgaggcaaaagggaaagtaacagatgatgaaacgaccgaattaaaaggcaaatttcaacaaggattcggtaaagcaaaagacaaggcaaaagaaacagcagatgatgttgctggtaaaatcaacaaaaagctcgataaagaaaaagaagattaatacattaagacctgctgcggcgggtctttttttggggtcaaatatttcttatgatcaacaaagcaattcatgaagtcagcagtttaaagcgatcaatcagctgggactattggatgaaagccttctttgtttgctatataatactattaagaagaaaaatgaaaggttgaggttgacgtgtcgcaaactgcattattggtcgtggatatacaaaaaggaacattagcaccattgattggcaaagaaaattttttgaaaaatgtgaatggattgatcgattattttcataaagaggatcttccgatcgtttttataaaaaaggctgggtatggtgaactttcgcagaaattacaccgtgaaccggatgatctagtgatttcaaaggttcaaatgaatacatttaaagcatcagaattccgatcgatcatttctaaacatgattttcggaagtttgtggtagttggcttaatgagtaacgcgtgcgtccaaagtacgtgtaaaggggctttggcagaaaattatcctgtgacattaattgaagatgctcatgattctgttattaaaccaatgcgaaatatttggaataggaggttacatgatctaggtgtaacgattatgaccactaaagagtatatagaaaagtaaaaggagtgactagttgtgcgtattttaatagttggtggtaaaggaacgatcggtcgagcaattgttgaaaaattgaaggaacatcacgagctgattatagctggaagaacaagtggcgatgtacaggtggacctaacatctgtagagagtatcgaaacaatgttcaagaaagttggacatgtagatgcgatcgtaaatgcttcaggaacagccaaatttcaatcaatagaagaaatgacccctgaggataatctagtggcggtccaaagcaagctgttagggcagatcaatctggcattaattggacaaaaatatttacgacgtgatggcagtattacattaacgacaggcatcatgaaggacgatccgattccaggcggggcttcggcagcaatggtcaacggtggtgtggcagcttttgtaaaatcagcagccattgattttactcagggtattcgcatcaactgtgtcagtcccaatgttttagtagagtcctatgataaattccaagattcctttagagggtttgtacctgtaccagcagagcgcgtggcaatggcatttgtaaaaagtgtcgaaggaaaacaaacagggcaggaatatcaggtgtattaaagggtgagaaatgatatagaatacaataatagatggttattttcacttgaagccagtattgttttagaaatattaactttgactgagccgagctgcgcgccgaaaaaaagcagatagccatttttactaaagcgaattatcagattttttcctaggataattccgttattttacacatattggaatctaaagtaacaaaacgcgaaaacagtgtgtttaaacgagagtgtaatataaaccgtgtaagtaaccattaatcctaggcaggtggttgcttcgcggtttttctttttctacaataagatcaagaggtgagtacacgatggctagaaagaaaagaaatcctgatgccgaaaagttagctgaatccattctgaatgcctatcaacctgaatctgtcgatgacatgcaagatgctttgaaagatgtgtttggtcccctttttgaaaagatgcttcaaggagaattgaataatcatttaggttatgatgcccattctaaagagcctaaggaacacgataaccgtcgaaatggctatggaaataaaacacttaaaaccagttttggtgaagtagctattgatgttcctagagactgggaggcttccttcgaaccagagttaattcctaagcgaaaacgagatgtttccgacatcgaagggaaggttctttccatgtatgcacgaggaatgagtcaacgagatatcgccgcaaccgtcgaagacatttatggctttgatatttcccatgaaatgatttcagacatcactgacgctgttcttcctgaattggaagaatggcaagcccgtccattggccaagtgctatgcttttctattcgttgattgtatgtatgttactttaagagaaaattatgaagccaaagaatatgctgtatacaccattcttggctatgatctcaaaggaaataaggaaattttaggattatggttaaatcaaacagaatctaaaaatcgctggatgcaagtgttcgatgaattgaaagcacgtggtgtcgaagatgtttttttcatttctatggatggggtttctggtcttgaagaaggcgcaaaagcgatctttccatcggtaattgttcagcgctgtattgttcatcttgttcgaaatgcattgcgctatattccaagtaaggattataaggaagtctgccgagatatgaaaaaattctacggtgcttcgtctctaaacgctgcacatgctgcttttgacagttttcaaaatcggtggtctcattattctggtgctgtagatgtctggaaacggaactttgcacatgttgaacaactatttgattatggtagtgccattcgaaaaattatgtacactaccaatgcggttgaaagtgttcactccagcttcagaaaagtcacaaaaaaaggagcgttctctaatgagaatgcactcctaaaactactttatttacgcacgaaagaattacacgcgaagtggtcaggtggtcgaattcaaaactgggctatggtgcttaatcagttaatgatcaacgagaccttctcctctagaattgaaaagtatgcgatttaccttccgtaacaacggtaggtttattcaactacgtgtccgatcaaaatttatctgatttcaaaatagccaagagaattatggttgttaaaaactcttaactatttaacttccacagtttagttgacaaacccgtttaaactgttttcgcgtttttgttagtcatttttttcagtggtgtattctttaaaggattttgttttgtacaaatcttctgttgattgctgattattcttcgaaaagacgctggttgattgatcacctagctttttctcaatcccgtttaagtttttgatggaatttttataattgatttcctctactttaaccgggctcaatccactgtcgtaataaaaccgcaacagatccccattattgatctgatcggagatatttagctgttcctcgactttctttttaacttctttggcttcttccagtatttcaggctgactaaagttcaatagagcccctgtttgattatcgtaaacatcacccttatggtaagaatagtcctccgtaacaaaatctccattgcgaaaggcgactaactgttctctattaggagaaagcaggtcgtgtcccagcagcattaaatcattagaatcataaccaactaaatgcaacaacgtaggcaatacatcgatttgtccaccataagtatgattgatcgttcccttttcttggcccggaagatgaatgatcaaaggcaccttttgtgcttcgatggtatcaaaggtcgtccaatcatctttgccaaataattctttagttgcctcaattcgtgagtcagaaataccgtagtgatcgccatataaaacgatcatagaattttcgtaaagtccgctggcttttagataatcaaaaaattctctgatggctgtatcagtgtaattcgctgttgcaaaatagccgtcgatcgttgagtcgccggtatctacttttgggaaaccattctccgcttcaggtaattcagaaaacgggtagtggttagagacagctaaaaatttcgcgtaaaaaggctgctgcatgtgctccaaatatttcactgattgctggaaaaaaggcttgtcatgcaacccgtattggaaagaattcttatcatttaagctataataactagagtcaaagaagtgctggtaaccaaatcgtttatatgtttcgttgcgattccaaaaatttccagcattaccatgaaaggcggcagttgtataacctaatttttgatcaaaaatggcgggtgcggcattaaaggtattcttgccacctaactgtgaaaatagagagccttgattcagcccaaataaagaattttccaataatgtttctgcgtcactggtttttccagcactgacctgatggtaaacattgtcaaagctgaaagagctttgactgtgatacagactatttacaaaaggcatgacttcatgttcgacaccgttttcgtctttcagcttgtaatcaatcaaaaattgatgggcactttctagatggacatagataatattcttatctttagctataccaaatgtttccttattcatttcttttggctgctgcttgagtttttccgctaaaacttctatatcattggggctggcctgtgcacggatttgtgagacttggtaggttttgacgccgtcgtaaacggtataggcgttaattcctaaatatttcactagataatctctagaaaatgttctagtcaataagcctggacgacttgtttctgccagtgcaatatttccagcaagaaacaataacgaagccatcgtgactgtaaaagccagctttgctcgaacgggacgagtatctaatgggagtttctttagtagtaaagcggctagtacagcaatacagtccagaaaatacagaacatcatgaggcttaaatagtcgtatagcactttctccaagtccgctggcgacttttcccgcacctaatattgtatcaatggtaagaaaatcggtgaattcttgataataaaccacgttagcaaaaagtaaggtgctaagtaccaagtaaatgagatatcctgtaatataggcggctttcgttctccggataaacaaaaagatcgacaaaaagagcatcgtggtcgctatcggattgattagcagaataaaaacctgaagcgcattatctaaacgcaggtcgaaatcgaccagataggcaaatagatttttggcccataataatagcgttaatatgagaaagaagccgaatctcgagttcagtttttctttgatcatgtcataacctctcttagtctttgttctaattagttaattgtatcgaaaaaacggttggtatgtaaaggctatcaatacgagatataacaaaatttagagaaaaagcaatgatccgcgaatatagtataaattggcgaattttaaaatgaacttagccacttcataaaacaaaaaaacgtcattgcccaatttcatgtattattgaagttcctacacaatcaataaaggatgaaatgacaatgacgcaaactgagaataccacatttttacgcaaaggcaaacaccttgattatgaagaacgaaataaaattgaagcttggaaacaaatcgatcgccctttgtcgaatcgtgcgatcgcaaaattactcggacgtgcccctcaaaccattcatagcgaagtaaaagacggtacggttcgccaaatcaggcgccaagtccaaaacggtaaaacctacgaatatgaatcgtttgtttattccgcagatgctggtcaagccgcttacgaaaacgcacgaacaaattctcgcaaacaaccaaaatgggtttcttcgccaaagttcatggcgtatgccgatcatcaaatgaagacagaaaaacaagcgcccgatgtcgttgttggtcgtgcaaagaaactcggcttgtttccaaatgagacaatcccttgtaccacaaccctttacaactatattgatctcggctggctggaaacaaaaaatattgatctgcatctcaaggttcgacgaaacaccaagcgatcacagagtaggaagaataaaaaaattctcggcgatttgatcgaaaagcgaccagatattgtggatactcgtgaacgttttggtgattgggaaattgatacggtgaacggactgcgcgttggcaaagaccaagcattgcttacattgaccgaacgtaaaacacgttacgaaataatcatcaaaatcgatggaaaagcagctaatccagttgatcgtgcactgactgctttaaaagaagctgcgggcaacgatttcgaagtgcttttcaaaacgattacttcagataatggtgctgaattcgctggtctaaccacacttcttaaagatattacggaagtttatttcacccatccctattcttcatgggaacgagggaccaacgaaaatcataatgggatcattcgccgttttataccgaaaggaacacgcatggaagatgtagcgttgaccaccattcgtcgtgtacaggattggatgaacaatttgccgagaagaatattgggttacgccactccgcgtgagtgtttattgaacgagctatcggagctatccttagccgctagataaccaacaaaaactaaataaccaatgaatttcaataagtggctaacttgcacttgaaatttgagtatagtataaattttatatgagatttgatttttttcaaaaaacgaaccgatagttttttctatcggtccattttctatgcttcggttggttgtttctggtattccttcacgaaggcttttgcctctttgttaattattttcaaatcgcatccctgttgctttgctgcaaatacacagccgcagtagcattggcgatacacatcgtactctttacacatctcaatcgaacgttggtagccggaattctttttgaaatcacttggcaagtaatgcgtattgtagattttttggatatccataccgatttgattgatcaattggctattttttttcggggaaatcgttaaggcactaccaaaatagtcgtaaccgcgttccaacgcttcttttgctgctaagtctaagcgcatattaaagcaagcggtacaacgtttcccgccttcaggttctgcgatcagttccttttgctgcgttaattgaatgaattcattcggtttatagtcgtcaataatcaaatcaacttgattgccagtcgctgtattaaagtcatggataaatttttcttgaactaaaactcgacgttgatattcactttcaggatgaatattggagttcgagaagaagatcgtcacatctgcgtgctgggtcaaaaattccaaggtataggtactgcagggtgcgcaacaggaatgaatcaaaatttgtggacggactttttctttttcccacgattgaatcatcttatgcaaaacacggtcataatttattttttggttattcattttctcaacgatttccgttgcatctattatattcatcaaatcacctgaaggtattataagggaaatgaagttagaaaaaaagacgattgagaagcactttaagatcttgaattgtcaaatcaagtgcaacactttattaaagaagacttcataaggtgttttccaacctagacactttctaggtctgctatttagtttttcaaccatccgataaatcgttgtgtcatctaccgtgtccatctctttcgattttggtaagtattctcgaataagaccattcgtattttcatttgttcctcgttgccatggggcatgcggatctggaaaataaaagggcacattattcaatgcttctgtaaccgcgaaatgattggagaattcttttcctctatctggagtgatcgttttaaccacctcattggggatactgcttaaaagttcaatcattttttcgctcacgtaagcagcttttttctcggcgcttttcctgctaaaaggaatcgcgattttcgatctgtcaacgtcactaaacaagcaccaccagtttttccagctacagtatcggcttcccaatggccaaactcacttctatcgtctgcggattttggacggtcatggatcgaatgcgtaatgcgtatttttccacgagtctcgacgtgattttttgtatgccttgtttttcctcgatgacgtaatgaacggatcagtcctctattgccatgggagagcggttctgtatcgaaaataccgttgtaaatggcacggtagatcgtgataaaactgatggagaaatccgcatgttcgaacttcaagcggttagaaatttcttctggcgaccattgaaaatcgacaaataaatgacgaacgattgaccaaattcgcggatcttttagaaggttatgacgtccgcagttttttcttcgagaagcatactttttgtctgctttggaaggggagtaggttttctccttgtttcttctcagttcacgtgaaatggtagacgggctacgatgaatgtcatttccaatttttctaatagaaacaccttcttcgtgaagtagaaagattctttctcgttcgagtatggtaagatgatgatactggctcataattatcttcctcctagtagtgttctcgacaaacctattctagttggatattgattatgagtcattttttatgtgttgcacttaaagtgtaaattcaagattaaaaaaatggcttaaaagtaaaaaaaagctgagaatgattgaaatatatttaaaactgaatatagtatatactataaggtatataccgaatgagatggaaaaagttaatctagccaagctgtggaagaatcagtatagtgaaaatgaagattggatagtagatagaaagaaataatcgaaaaagggagaaattatggaggataagaaaacgacaaaggcgaaatttaatcaggtatccgctgagatcgaaaaacgtatccatgaaggaatctatgtaagctcacaaaaattaccttctgaatatgacttggcgaaggagtttgattgtagccgcttaacgattcgtaaagccatcgatgatttaatcggcaagaatattttggtgaaacggcgcggtaagggaagctatgtaatgtcacagccaaaaattcaaagtgggcgctctgggctgcaaggctttactgaagccgcgaaggcctatggaaaaaccagtagtacagaagttatttcgtttaaaaaggttagtgagccgtcagaggaaattctgaacgcactgcaactagaagaagatcaaccaatctatgagttggttcggcggcggatattagatgatgaaccaatgacagtggaaaaaatttatttgtccgagttttatgtaaaagggttaaaagcagaggatttcagcggctccctatttaaattgctagaggaaaaaaccgagattgcctattctcatcaggaagtggaggcaattttggtcaaaccggagctttcaaaattactggatgtaccgatgggagaccccttgctgcaagtctattctgtgacctatgcattagacgcgacaccgattttttacgatatctcttactatcgctcggatcgttatgtctttaaaacaacacttactcgctatggcaaataaagcaagtacaactagggaggctcttatgacgattgattttcgaaaagtaattgaagaaaacaaggaacaattctatcaggatctggatcaggtaatgcaaatagaaagtgttaaaggtacaccagcaaaacaagcaccttttgggaaaggccccaaagaagccttactcacagtgatgtctttagcggaaaaatacggattcaaaacggcgatcatcaatgatgtagtggggtatgcgcaatggggtgacgcagaagactatattggtgttgtgggtcatttggatgttgtcccagcgggggatggttggtcgttcccaccgtttaaattgagcaaaaaggatcagcgcttttatggtcgcggcattttagacaacaaggggccaattttagcttgcttatttggcttgaagctgttgaaggagatggatctgcccgtaaagaaaacgatccgaatcatttttggtaccgatgaggaaaacggcagctcagatattccgctttatttgagcgaagaacagccaccacagtttggttttacgcctgattgcaagtatccggtggtttatggcgaacgtgggattgttaactatgaaattttgacaacgtttcctcaagaagaactaaaagatttaggtgatttcatcggtgatcaagcccgcgatcatgttccagatgcgttatcagtaactattcacggcaagaatatcagtgtgcaggggaaaagagccccttcgaatgcacctgaactaggagaaaacgcaattacactattggcggaaaaaattttacaggaacaagccgttactggaacactggcggagtatttttcttggctaataaagagcctagccaatcagcatcatggggaaggcttaggccttgctttttcagacgcggatagtggtaaattaatgatcacgccctatgaattgatcaaaaaagaccagcagttagcgctttcggtagcgattcgctatcctgtttcagtcacagaagcagaagttaccgataccttgaaaaaacatttgccaccggagagtcagctaacagtagtccgtcgcatcaaaagcagctattttcctaaggatgatcccaatgttcaactcttatctgctgtttatgaagaggctacaggattggatgggactccggtaacgacgaccggagcaacttatgcccgctttattccgaatatcgttgcctttggtccttcgtttcctggtcaaaaggggattgcccataatcaggacgaatatatggatgaaaaggatctgttgaaaaacatggaaatctatatgcggggcatgttaaaactaatagaataattgattttttgagacccagcaagggattgcgggtcttttttttcgttatttcataactttagcttagaaaacggtaaaaaaagataaaaaaatttcaaatttagtatatacaaaacagtatatactatctataatgaattcagattttgaaaatgtaaacggtaacgggaggagcacgacgatggcgtggggagcaattgcgacatggcgcatggcacatgatggtgtaatagaagcaatgcatttgctagagaagaaaggggatgctggtgacgcagtagagaccttaataaagacagtagaggattatccttattataaatctgttggttttggcggattgccaaatgccgagggaatcttagagatggacgctgccttcatgcacggggatacctttgaaattggtgcagtggcaggaatcaccgatgtaaaaaatccaatctctgttgcacgaaaacttagtaaagataagttcaatagttttcgggtcggtgaaggggcaaccaaatattcaatgctggaaggcttcgaacgaaagagtatgctgacagaacgtgcccataaaatttgggagaagcgtttgaaggaaattcaggaaaataatctgaatccctacgatggtcatgataccgttggcgcgattactttggatcagatgggaacgatgacggctggcacatctagctctggactgttcatgaaaaagccgggacgggtcggtgattccccattatctggctcgggcttttacgtggatagtgagatcggaggagcagcagcgacaggattaggcgaagacttgatgaagggctgcttatcctatgaaatcgttcgtttgatgggagaaggggtgaagccgcaagacgcctgcgataaagctgtctatgaatttcatgataaattgactgcacgctatggcaaagcaggtgctttctcattgatcgcgatgaaccctaaaggcgagtggggcgtagcgacaaacgttgaatttacgttcagtgtaggtaacgataaggaaaacccacagattttcattgccaatatgggaagcggtcacactacagatatccaaccgatcacacaggattggctagatgcctatgaaaaacggattaaagcaccgattgaataaaaaataggagagtgaagaaaatgagtaaaaaacaaatttatctattttgcgatgcagggatgtccacaagtattatggttaacaaaatgatggagatcgttgaaaaacataatatgccgctgcaaattacagcttttccagtagcacgtgcacaggaagtagttgaaaaggaaaaaccagtagcgattcttttaggcccacaagtaaaattcttattggaaaaaacacaggaacaatttgctccgcaggggattccagtagcagtgatcgcacccgagatttatggcatgatggacggggaaaaagcaatgaaggacgttctaaaattgcttaaaaaaaataaaaaataatattgaactgattggaggataaaaagatgcagaagtttttaaactggttggaaaaagtcttgacgccattagccaaaatcatcggggaaaataagtatttgatcgcgatccgtgacggttttttgatttctacgcccttattgattgttggatcgttcttcctacttttggcgaattttccgattccgaattggagcaacatgatttctccaattttaggaaataattgggaatccttgatgtcggtacctgcttcagccagcttcgatgtgatgacaattttagcggttgtgggaattgcttatagcttaggacggcaattggaaattgatgcgattcagtcggctgctctggcattggtttcgttctttatcctgacgccttacactacactcttcacaccagaaaatagtacgaaggtgtatgaagtaacgagtttacctttaaaatggatgggttcaagcggactatttttaggaatgatcattgcgttagtttctacccggatttttgcggccgtgattcaccgcggctggacaatcaagatgccagatggtgttccgcctaccgtagtgaagtcttttgaggcattgattccaagttttgtggtagtaacaattatgtttgttctcaattggttagtttctttgacatcaatggggaacttgcaagatgtgatctttacattcttacaaacgccactattgagtttaggcaacacgttaggcgcgatgattattgcttacttattcctacatttcttttggttcttcggtattaatggaagcagtgtcgttggtgcggtgttcaatccggttttacgcgcattgtcagtcgaaaatatgcaagcatttaaagacgggcatgaaattcccaatatcatcacaggtcaatttcaagacatgtttgcgacatttggcggtggtggctcaacactgtcattaattatcgtgatggtactcttttgtaagagccagcgagtcaaaaagttatcacagctatcactcgttccaagtattttcggtattaatgagccaatcatttttggcttgccaattgttctgaacccgattattttgattccttttgcgctagttccaactattaatattattatttcttactttgcgatggattggggacttgttccttatacaaatggtattcaactgccttggacgacaccgccgattatctccggctttttagtaagcggctggcaggcctcagttttacaggcgttgctgattgtattaggaatggcgatctattatccattcatcaaagtgctagatgatcagtatttacgagaagaaaaagaagcggaagagcttgaagcagaagagatcgactttgatacctttgattttgatgaaatttaggcagaagggattttggggaaatgaatgatgaacagttacaggtagttatgggactaattatgaatgctggtaatgcaaagggcgaagcaattgcagcgttggcggcggcgaaggaaaatcatttttcggaggctgagtcacgaatgaaagcagctaatgatgcattagttgaggcccacaatacgcaaacgagtctgctgaccgcggaggctagtggaaataattcagaagtgacattattgatggtgcatagtcaggatcatttaatgaacgctatttcctatttaggcttaactcaagaattgattgatgtttataaacgactgaaggtattagaagcaaattaaaatccaagtctgacaaggagaatgctctttgtcagtttttttgtatctagacaagagattggagaggtataatcaaagagaaaaattatcggagggcagggactcaatgaaaacatttatcacatataataaagaaaaacacatctatccagtagttatcagtttgccccatagcggaacatggataccagaggaaatgcgctcaagcttacgaaaagatgcggttttggcgaatacagattggtttttacctgagctatacaattttttagtagcaatgggctgtacgatgatcgaaaatcgagtgaatcgttatgtggctgatccgaaccgagaaagtcaaataaaaggaatgaattatcaagaggcggtgatttatcagcaaaatacctttggaaaagccttgtatacaaaaaagctaacatcagatattattactgaacgcttagaaaactattattggccctatcaccaagcattgcagagattaatcgatgccaaaaagagccgatttggaaaagtctatttaattgatctgcatagctttgcggaatatccaaatgatgccagaactaccccagctgattttgtgattggaaatcaaatggatcaaacttctagtgcgaaattgcgaaagctgttaacagtttttttaaaggaagctggctacagcgtttccaacaatcactcatttcgtggtggatttattacccgtcactttagtgaactatccggaattgaagcattacagctagagattcgctataatcagtacattgagaaacgttctttcggtgaagaggtactaaccaaacatgattcagaaatattttcaaaagcacaagaacatttagcaatggtttttaggaaattattcacggaactatccatagagcaatgattttagaagtctgtactactaagtaaaaaagcgttcgatcatttttgatcgagcgcttttaatagtcatttggatagtgcaccacgataaattttacgacattgctagtttggttgtcccaattgtgatcaatcgtcgaaaaataatgagcggagtcgcctggataaagttggtacgtcttttcttcgatcaccagtgttaagattccctctaaaacatacacgaattcttctccttgatgtggataggtagtcggcaattcacgcttttcatgtggcatgatttcgatcatttttggcgcaatcttcttatcctgtggtgtgcggcttaattgtttatagatcatgttgtttaatttgtggatcaccggctggtcgtacccgcgaacaatcggttcaatttcaggttcttcttcaaaaaaataattaattcttactttaaataaatctgcgatacttgataaatgttcaaccgcaatcgttgtaatcccccgctcgaactgcgataagaagccggttgacaaaccggtggcttcagatagctgtttgagagtcatcccttgttcattacgcaaatttttcactttttctccaatattcatctgttagcccctcacatgattaattatttttagtatacctgaaaaacggataaattcctaaccgtcattaagatgaaaaaaaagcgaaaaataaaatgaaaaattcatcaaaatgaattaagcgcttgcaactttctcgtttgagttttataattaaaggcgggagggaagtacgtgaaaaagccgacgatttttaatattcaaaagttttcgacccatgatgggccgggaattcgtacgacgatttttttcaaagggtgtcccattagatgtgaatggtgtcacaatcctgaaagtcaagtattttcaccagagatcatgttaaacaaatatggcaaggaagaactgattggtaaagattattctgttcatgagttagttaagaaaatccaagcagatcaaatcttttacgatcaatcaggtggcggtgtcacattttctggcggtgaagtgatggctcaaaatatggattatgtggttgaactagcgaaggaatgccagagattaggcataactgtcgctattgatacctgtggagtcgccccaactgaaaattatcgacgaattcttccatatgcagatttatttttgtacgatttaaagttcattgattcacataatcatcagctttatacaggtgctggcaatcaattagtgctggagaatttgcgatttctatctgaacagcaagcagaaatcaatcttcgtctaattttattagatgaaattaacgcagaagaactggatgcagaggaagttattgcttggctagctaaagagaagattcatgtgagtgaaatatcgttgctgccgtatcatgatttcggacgagataaatacgaacggttgaaaagagtgtgtacgcagaacttcattaaaccagcagatgaaaaagtagcgcgcttgcaaaaaatttaccaagacgcaggttatcaagtaacgattggcgggtaagtgatcaagaaagatgaaaatacaaaataggaggaagatcaatggcggaattaacactagaaccaacaagaagaggtagtacagaacgaatcaaacgattaagggaaatcagtgataaggaatgtacaccaagtatttcaatggaacgagcagtccttttgacggaagcctacaaaaaatgggagggcaaggtttctgcgcctgttttacgaggaaaggcgttcaagtacatcatggaaaatcgcaccaattatattgaaaaaggctctctagttttaggcgaaaaaggggataaaccgtgggctgcaccgacatttcctgaattgtgctgtcatactttagaagattttgacaatatgaacaatcgtgagaaagttttcttccgtgtgagtgaggaagatcgtcgtatccaggaagaggttatcattccctactggcatgatcgtgccatgatgacacgaatgaatcgattgctgccagaggaatggcatttattatttgacgcagggttgtataccgaatttttaatgcagcgcggtcctggtcatacagtagctgatggaaaaatgtaccaaaaaggttttgccgatttcaaagcggatatccaacaagaaatcgacaacttggattacaacaatgacatggaggctttaaataaacgggaagaactagaaggcatgaagctagtttgcgaaggcatgattatttttgggaaacgctatgcacagcaatgtcgtgatttggctgaaacggaaacagatcctcagtggaaacaagaactattggatttagctgaagtctgtgatgtggttccagagcatgcgccgcaaaacttccgccaagcgattcaaatgtattggttcactcatattggtgtaacggtagaaatgaataactgggatgcctattctccaggtaaattagatcagcatttagagcctttctatgaaaaggatatcgaggaaggccgcttaacacgtgaaaaagcgcgggagcttttggaaaatctttggattcaattcaataaccagcctgcaccgccaaaggttgggattactttaaaagaaagtgcaacctatacggatttctgtaatttaaatacgggagcattacgtccagatggaacaagcggtgtcagtgatgttagctatttgattctggaagttatggatgaaatgaagctgctgcagccaagctcaaatgttcaaatttctcgtaaatcccctgaaaaattcctgcgtgaagctttgaaagtttcccgtaaaggctggggacaaccagcaatgtataattctgaagcgattttagccgaattaagctatctaggaaaatctgtcgacgatgctagagaaagcggcatttgttctggctgtgttgaagttggtgtagccggaaaagaagcctatgtgctaactggttatttgaatatcccgaaagtatttgaacttgctatgaaccggggctacgatcattacaccgataaacaggtgggaatcgatgtaggcgacttcactaaaatgaaaacctatgaagaagtttttgacgctttccataaagagctgcaatacgtagttgatgtgaaagttgcgggtaataacatgattgaacggatgtatatggaatttatgccggtaccgctgctttctgtgatgtctgatgattgtatcaaagttggtaaagattacaatgcgggtggcgctcgttataatactagctatatccagtgtgttggtatcgcaacgattactgattcattagccgcaattaagcataacgtctttgaagaaaaaacgatgtcgatgcaggatttactagatgcctgtgaagcagattttgaaaactatgacgaaatctttgatcgtgtctataatgaaacgcctaaatatggaaatgatgacgaatacgcggatactttattacgtgatgttgctgcttctctacaagaggtaattgcaggtcgtccaactccgaaaggctcaaaaacggtcgtggaatttttaccgacaacgtgccacgtttactttggtcaagtcatggaggcatcgccaaatggacggcataaaggaattccattaccagatggaatttctccagaaaaaggcgctgatcgcaacggtccaactgcggttattaagtccgcatcgaaaattgatcaaacgaaaactggtggtgctctgcttaatcagaaatttacacctagtgtggtagcaggagaagcggggatcactaatatggcttcgttagttcgcagttattttgcattagacggccatcatattcagttcaacgttattgatcgtgaaacattgataaaagcgcaaaaacatccgaaagattatgaaaatctaattgttcgagtagcggggtatagtgattacttcaataatttagaaaaagccctgcaggatgagatcatctcacggacggagcaagccttcggataggcaagcttaataaagactacttttatgccagagaaaatatttctctggttttttgttgcctataattttctaaaacttaaaattgcaggcaattaataaaaaacgtttgattgcatataagagaacaggaaaataataaatagtaaaaagcagatggactattccatagtcttaaacctgtaataacaaattgaaaaactttggaatggaatattcataaagtgaaatagataactaaatggttttataaaggataacaaaatgataaaaacagaaatctgaagattcataaaagaacaaccgtaatattattttataaaataaataacgaaaaaaatgagttgaaaacggattgcatcatcttgtaaatgttggtagaatgagattgataaagtcagtcgtttgtcgacaatcgactaaaagcgaatttatctatatccttttaactataaaagagcatctaagatgtaaatgttcagtgaatcacaatttggttggttcatctacttttagcatcttattcacaaaaagtaaaaagaaagcataaaaattttatttaagaaaatcacggtggttaatcatcgtattttataaagaaagggatgaaggatagatatgcaagtgtatgacgtaatcatcatcggtgcaggaccagctggcttgtcagcagccatttatgccggacgtgcgagactaaaaacattactaattgaaaaagggaaggatggggggcaaattatactgacttccgagattgaaaattatccaggaagtcttgagaaggaatcggggcgttcgttgattcagcgaatgactgaacaagtagcctcattcggtgtcgaacgggccgcagatacgatcacagaagttgacttatccaacgatgtaaaggtcattaaagggaaaaaagaagagtatcaaagtcgttcggttattattgcttctggtgcctttccgcgtccaattggttgcgagaacgaaaaagaattcatggggaagggactatcctattgcgcgacgtgcgatgcggccttttttgaagacatggaggtttttgtgattggcggcggaaattcagctgttgaggaagcaatgttcttatcgacctttgctcgaaaagtgacaatcatccagaatttaccagagttgacggcagatgttatcgcaatcgagcaaataatggcaaatgaaaaggtccattttatctacaattctgtagtagaaagacttgagggtgatggcattgttgaagcgataacgatccgtaataccgaaacaaatgaagcaacacgtttcgaagctgacgaagaagacggattgattggtgttttcagttttatcggctacttaccgcagtcgaaaatttttaaaaatgtcttagaaatggaaagcggatacattaaaaccgatgagaaaatggcgacgagtattcctggtgtatacgcagcaggagatgttcgagtgaaaaatgtgcgtcaagttgttaccgccagcggtgatggctgtacagcagctgtcgcagtcgaaaagtatctgcatcattagcattttacttgaagtgtaaattcaaggtagaaaaaaataagtacattaaactgaataaggatttcagttctgtttcttgctttagcaagattaacagaatgacatacggcatgaaaaacaaattcattattctttgagaaaaatgaatacattaatctgaataaggagtagtgaaacgatgaaagttttaaataagaaaaactttgaagaggaagttttacaaagtgaaggaacaatgctagttgatttcttttcagaaacctgcgaaccctgtcaagctctgatgccaagtatcgaagagtttgcagataaatatagcggaaagattccttttgcaaaattagatactgcgaaagctagaagagtagcaatcggacaaaaaatccttggaataccagtcattgcaatttatcaagacggtgaaaaagttgaagaattggtgaaggacgatgcaactccagaaaatgttgaagcaatgattaagaagtatatttaacgaggaaactcgtttaaataataaaaaacaaggaggaatcaatatgttgctgaaagacaaaaaagttatcatcctcggcgacagagacggcgttcctggtcaagccattgaagaatgtgtaaaaccactaggcacagatgtagtattctcatccacagaatgctttgtctgaacggccgcgggcgcaatggatctggaaaatcaaaagagggtaaaagaatttacagaggaattcggtgctgagaatattgttgttgttcttggcgcggcagaaggtgaagctgctggtttagctgccgaaactgtaactttaggcgaccctacgtatgccggtccattagcgggagtccagttaggacttgacgtatatcatatcgtggaaccagaaatgaaagaagcgatcaactctgagctgtatgaggaacaagttggcatgatggaaatggtactagacgttgacgatatcgtcgatgaaatgacttcaattcgaagtcaagtaagtgaataagttcaaagtgcagcttttttgatgatgctggactggaacttgttcagcatcatcccacaattttgaaaagaaaggatgtttctatgtatagcgtattgaaagggtcgagctattttcttgcacataccccagatatggtagtctacaacggcactactcaaacacttcaaagaaaaattgatcctgattcagaatacttgaaagaaataagtaaccatctacgcgattacgaaacttgtgtcgcttatccaccgaaccaagtctatattggaaacatgacaccagaagaactcgaagctatcgagaccccttggtacgataaaaaagctgagaacaaacgccagggtacttttggtgagatcatgcctgaagatgagttcatcggtatgatgaaatatgtcgatgtgtttgacttggtcaaattgaaggatgattttagtaaaacagtaaaagaaaaattagatcaacatccattattggatgagaaaattttagcaaagctctcagaggaagtatcctcggaagagatttcaggtttcatcgaaaatgaacaggcagaaccaatttattttaaaggcgatgtcgtgggctgtgtaaaagtcgctcataatttagatgataccttgtttgctcatgtcatttttgaaaacctggtttcgaaagcatcctgtacgattgcgatcttacatttgcttcagcaaacaggcatcgccaaaaatgaaattgaatatgtgctcgaatgttcagaagaagcctgcggagatatgaatcaacgcggcggtgggaactttgcgaaggcagcagcggaaatggctgggttggagaatgcaactggcagcgatgttcgcggtttttgtgctggaccgacccacgcattgattcaagccgcttcattagtgaaatcgggcgtcttcaaaaatgtaatcgttaccgcaggcggttcaacggcgaagttaggtatgaacggaaaagatcatttaaataaagagctaccaattttagaggattgtgttgcaagctttgcagtcttaatctctgaaaatgatggtgtcagtccagaattgaatattgatattgtcgggcggcatacggttggcacaggcgcttcgccacaaaaggtaatttcgtcattaactagcatcccgttggaaaaagctggattgaagctgacagatatcgataaatattctgttgagatgcaaaatcctgatatcactaaaccagcgggagcaggaaatgtgcctgaagcaaattataaaatgattggtgctctagcagtaatgaaaaagcagatcgaaaaatccgaattagctgatttcgtgaagcagcacggaatggtgggatgggcgccgactcaaggtcatattccatctggtatcccatatcttggcttcggacgaaacgatattatggctggtaaggtcaatcgagcaatgtttgtcggaaaaggcagtctattcttaggacgaatgacgaacttgtttgatgggatttcctttgtaatgcaaaaaaatagcggcaaacaggaggaaactgtttctgaagatcaaatcaagcaattaattgcggaagctcttcgtgacttcgcaagtcatcttgctggaaagctagaggagtgatcctatggctgaaaaagagaccaaacaaataatcgcggatgtgtttcaaggacttgcgaacacgttggaaactggccgaggtgtttcctcaacagtggcattaactgccttaggaagcgagcatgacgaagcagagctgatcgaagcggcaaaaatggctgctgacaaaggaatttcggtaaaagttattggcacacagaaaatcgactattctgggattgaaagtttcttagtttcagatgcggaggaaggccataagaaattagaggagctattgaacgaaggagttgcggatgctggtgtgacgatgcactatccgtttccaatcggtgtttctactgttggtcgagtgctcactcccgccaaaggaaagcacatgtatctagcaacaacaacgggtacctctgcactgacacgagtagaggcattggtacggaatgccttatatggcatcatcacagcaaaagcttgtggaatcgcagaaccgaccattgggttattgaacattgatggcgcgcgtcaagcagagattacattaaaacgattggcggaaaatggctatccgattcattttgcaacttcgaatcgcagtgatggaggagcagttatgcggggaaatgatgtccttgcagggacttgtgatgtcatggtaatagattctttaacggggaatattttgcagaaaatcttttcttcctatagcacgggtggaaattatgagtcgttagggttcggttatggccccggtgtgggagaagaaatgaataagctaattatgatcgtttcccgtgcttcgggttcaccagttgtgaggggggcgctagaatttgctgacgagttggtacgaggaaacttccagcaagttcaagaagcggaatttgccaaattgaggcaggcgtctttagatactttgctaaaagaaattcaaccgcaaaaagaagtagtacaagaagaagttactcaaccagataaagaaattgtaactgaagagattcatggagtagaaatcttagatttagaggatgctgttcatcatttatggaagcaaggaatatacgctgagagcggtatggggtgtaccggtccagttgtaatgattgcggacaaacgcttgtctgaagcgaaggcttgtttggctgatggcggctatataggaaactaagttgccgcttgtatatgtttaacgtaaaaatatcaagttttactctataaagagcatttagatgagatacattgatttgagaaaggagcaagtaaatgaaattaaatatcgcaaattttcatgtcgtggatattcaattcggtgaaaagacagcatatgccgatggaatcttgacgatcaataaaaaagaagcgttagatgttgtttttgaagacgaacacatcacaaaagcagaactacacatcgttaaacccggggatgaagttcgattggtcccggtaaaagaagcgattgagcctcgttatcgtgttggagacggaccagtttttcctggcgttactgggaaattgatgcaagctggtgacggggtgactcatgcgttaaaggacatgagtgtcttagttgtcggacaacactggggagggttccaagatggactgattgacatgagtggagaaggggcgaaatatacctattattctcaacttaaaaatgttgtattagtggctgacacggatgaagaattcgaatggcatgagcagcaaaagaaaaatcatgcactacgctgggcaggcatgcgtttagctgagtatatcggagcagtcaccaaaggcttaaaatcagatgaggtggaaacctatgaactagaaccgattaccaaacgcagtgaagcggtcaacaaattaccaagtgtggtctttgtcttacaaccgcaatcacaaatggaagactcaggctataatgacttaaattacggttgggactgcaatttgatgcttccgacttttatgcatccgaatgaagtgctggatggtgcgatgatttcgggttcctttatgccgtgttcatcaaaatggtcgacctatgatttccaaaacttcccaatgataaaacggttatatgaagaacatggaaaaacaattaatttcctaggaatcattatgtcgaatctaaacgtcgccttggagcaaaaagaacgtgcggccctatttgttgcgcaaatggcaaaaagcttaggtgctgatagtgctgtggtagcagaagaagggtatggtaatccggatgctgactttaccgcttgttatgtagctttagaggatgtagggattaaaacggttggtttgactaatgaatgcacagggcgcgatggcgccagccagccacttgtatcaatggacgaaaaatgtgatgcgatcgtttcagcaggaaacgtgtcaacgttgattgaacttccaccaatgaagactgtattaggagaattagaagcgttagctagagatggcctttctggcggctggtcaaatgatgaaattttgggtgcttcggtaaaaccagatgggtcgattattatggagaacaacgcaatgttctgcggagatcaggtggttggctggtcaacgaagactatggttgaattctaaatttgtcatttggtactttgaaatgaactgaagaattaaattgaagcgtttttccaaaagaattcaagatagacagaattaggagggaaagtttgaaaataaatctatttgaagatacctgaagaacggtacactaaataagcctaccgttttcaaaatttttgaaatggaagacaacgagtctatttaggaagaatcaacgtaactttggtttaagcactatctataatggtatatccgcgttttcttaaaaggtccagagcttgggattgcgtcagaactttctcttctttcgcaggttttggctccagatatcctttagcagaatagggttccacctttgataagacattccagatagcggtcaggagcatcttacaaatagcaatgatagctttcttgtgtccacgattcgctttgattctacgatagcgatttttaaattctggatgttctttggatctgagaagagcattggcaatctgtacaagtagcggtttcaacgactgccctgcacgagagatacgtgttgattttgttcgtcgggcactgcgatcgtttcttggacagcatccagcccaagaaataaagtgtttcgaagttggaaacacggacatatccggtcctatttctgaaagaatcgcaatcgctgttattggctgagtgtctaagcccggtatggtacgaagtagttccaaaacaggggagaagggttctgcaagagcttgaatctctagattgatctcttctcgatgcttctcaatctcgttaatatggttgaggcattggcgaagcttaatcgcttgaggtacagaaatcgccccctcaactgccgcttggatttcttcaacgggagttttacaacgggcatggataaatggtcgaacatcaaatgattcaccgggatgttctaacaagtattggatgatagaagtggatgattttccgaacacatcactaaaaacatcatctagtttcagattagaaacggttaagcagtttaaagcacgattcttttcacttgttttcatgttggtcagtttcgtccgataacgcattagatcacgaagctggcggatttcaagaccaggaataaaactgggtttgatcatgtcgcacataaagagatcacaaatccattttgcatctttgcgatctgttttatttcctttctggggtttggtgtacttcggatgagccagtgtgacaaaacaagttttttcaagaatattaaaaacagggatccaaaatttaccggaagattccaaacacacatccttacagttgtatttagcaagccattcagctaattcattgagaccttttgtaaaggaagagaagcgagcttgcttatacactgtacgaccattcgcatctgtgattccgatacacgcatagatccacgttttgtggacatccaagccacaacaatttttacgaaagattttgaacatagcaacctcctgtaaaaaaatagtacaggtttggtagggactggtcatccggcgaaatcgagtcaacttcggaagagataagtttacgggctacgggtttgcgccattcattgatgccttaacggatgaccgacaccatataattatgcggggttgccgctatacagccccgccactcacctcctcgggttctgtagtgtaccagggacctgcaaggaaagggtaacacggaataaaaaaagaaagaaggcgctctaaggttttcatcacctcattggtgcctttcgtaggaaggcggatttataattatgaaagcgattttatatatcaatcagtttttcggacagattggcggcgaagaattcgctggtcatgagccggaaattagagagggaattgttggcccaggtatggcttatgccaaagctttaaaagatgaagttgaaatcacgcatacgatcatctgtggcgacaattttatgggatcaaaaaccgacgaagcaattaaaagaattcttggctttttagatgataaagaatttgatattttctttgccggaccagcatttcgagcagggcgatacggtgcagcttgtggacatatctgttcggctgttcagaagaaatttggtgttccagcaatcacctcgatgaatgaagaaaatccaggtgtggagatgtaccgtaaggaaatgtacatttttaaaggtggagcaagtgcagcggcgatgcgtaaagatgttgcgaaaatatccgcttttgccttgcgtttattatatggagaaaaattgaactcagcagctgaagagggttatttcggtcggggaatacgtgatcaaatttggttggacccaccagtaccagcaaccgaccgtgttattgatatgctattgaaaaaagtcaatggagaagagtatcaatctgaattgatcattcctaaatcagaacgagcaccgatcgcgccagctattccaccagaagagttggctaaaataaaagttgccttagtgacatctggcggaatcgttccagttggcaatccagatagaattcaatctgcttcagcaaccaaatggggcaaatataatattgaagaaatggatgagctgaaaaaaggtgagtttatgacaattcacgcggggtttgacccagctgccgccaacgatgacccgaacgttgttctgccgttagatgtaatgaaagaatatgcgaaagaaggaaaaatcggcggagtgtatccgtacttctatgcaactgtaggtaccggaacgacgcaagcagaagcgactcggatgggacaagaaattgcgcaggaattggtcgatgatggggttaaggccgttatactgacatccacctgaggcacctgtactcgttgcggggcaacgatgaccagagaaattgaaaaagcaggaattacgattgttcaaatggcgaacctgattccagtggctcgtacagtaggtgtaaaccgaattgtaccaacgatttcgattccatatccattaggcgatcctgccacaccgaaggaagttcaacacaaactccgttaccatcgtgtgggagttgcgttagatgcgttaaccactgatattgaagaacctcgactctttgaagtaaaagtttaattgcagaattgacgagctgtttaacgacggctcgtccaacaaaaaaactttgaagaggagacgttcagatgaaaaaaaatatagtattttatgtttctcttttaattacggctattatcgtagtgattgggttaattgcgccaggtccattcgcacaggcgatgaatagcacgaaagcttttttagtagatacatttggttggttttatttaattgctatgtttgtatttgtcgttttctcgttacttattgctttcagtcgttttggtaaaataaaattgggctcagacgattctgttcctgaatatagcaataaatcttggtttgcaatgttgtttggagctggaatggggattgggttggttttttggggagtggcagagccgctgaatcattttgctacgtttggcggaacagaaaaagcagcggatatagctatgcagaaatcttttttacattggggctttcatccatgggcggcttattcgattattggaatggcgctggcttacttccaattcaggaaaaaaacacctggattgatcagcagtattttcttaccgattttaggcgaggaaggtatacgaggaccgattggaaaactaattgatatttgtgcggttttcgcaacagttgccggaatcgccacctcgcttggtcaaggaaccttacagattaattcaggtctgaattatttgtttgatattccaacaacacgtctggttcagattattattattgtgggcttaaccattatttatacatggactgcagtcagcggaattgataaaggaattaaactattatcagatatcaatctttatttggcaatcgcgctgcttctaggggcttttctggttggtccgaagatcatgtcattgaacattttcactaattcatttgggggatatatcaataacatcgtatcagaaagtttttcaatcaatccatttggagacaactcgtggctgggttcatggacaattttttattggtcatggtggatcgcttgggggccatttgtaggaacctttatcgctagaatctccaaaggaagaacgattaaggagtttgtcttaggagtaatcattgccccatcgatggtttcctttatttggttctcgatctttggcagtttaggattgaatcttgatatcggaattatcaataaggcaaaggaagtgacggaaacagcactgtttgtggttcttgctgaatatccattaggaatgattttttcaatcattgctatctgtcttttgtgtacttttttcatcacatctgccaattcggggatttttgttttgtcgatgttttcgtcagagggtgatttgaatcccggcaatgataaaaaaatcttatggggagtcattcaagctttattagctttggttttattgatgaccggcggtttggatgctttgcagacatgctcgatcgtagcggcattaccattaacagtgatcatgctattatgtgccgtttgtttatttaaggctttgatgcaggaaaagaaaacaccagacaaattatccgagtcttctaagctagaataacgcgactaggctggctattcatgtgaataaaagtacaattgggtttttctggaaaatcagagatattgaaacgattgaagcggtcaaataccgaacgacaagagacttagcaaaggctttctgatataattagtgacgtatatctgaaaggatgctgaattatttatggatattatgcctagatacgaaaaacaaagcttaagcgacatggtcgtatcgtatgttaaaaatagaatcttgtctggcacgttaaaaggcggcgatcgcttaatcgagacagatatctcgaatcattttaatattagccgagctccagtaagagaagccatgcggattttgaacgaacaggggttaatcacgttttcacctcgcaaaggcaatcatgtgattgaaatggacccagcagaaataatggaagtgtttgaaattcgaacctcactagaaacgcaaattttacgaaaaattttgcgaaatcaaatgattaaggaagaagattttcaacagctgacagagattgctttggagatgaaggatggcgagaatcgttgtcgtaatgaagaggataaggtctttttgctgaatacattagatatttcattccataagtatctttggcagctgtcaggcagtgtgcgcagagcgcagattttagagagcttgttctatcagttacttatcgccatgaacgaagatctttcttctttggggattcttgagaagaaatcagaagagcatctggcttttgttgaggttttacgtaagaatgaacttccattagtagttcgttcgtttcataatcacatccaaaattatgttaaagctactttgccggaggaagaacagaatttttgtttggattgctaggaaacatgtttttgcttgtttctaacttttggaggaaatatgacaaacaaagtaaaggtttggacgaagcagcatgaaaatattttacaggtgttagaacaaacgggacggtatattgcgaaaaaggaatacatccagcagaagatggaggaccacagcagtctgtatttaggtgtatatgaatggtatatgcaggcggctgcgcgttttgttcagccgcctgctgacgtgaaatatccaatttgggtatcgctttcagaagaagacagtattcaaaatagtgaaggcaatacgattttagaaattgaacttgacgaggatcagctgattgtggttgatttattgaaatggggaaatattgtcaatcatttgtacattcccaaagatctagaagaccaaagggaacatacaaggctgttggagaaatatggaattgatgatattactgcttttatgacgcctttttatcccaatatcaaacaaaaaatcgagcaaagtcatgagcggcttttcgatgattcgagtgtattgggagagatgaaagtgggaacgatatgggaaattcgcaaggaatggattactcaaataaccaggtaacattgtatacttctcaaagtcgactggtagttgataagctgattaaatcgggaagacatgttgtcgacaacacctttataaaggaaaagtacggagaaacggctcaagtatttttgcaggcgtacagctggtattgtcaaaatgccgaaaaaatcgttgagcgtcctgcagacgctgattctgcgatctggacttttttagatgtaaaatacctcgattattcaatggattctcaactaatcaagctgcgtgtgccgatcgagcaggttgtctttttccgtatgtctgattggaataggattttgaatctgcgttttctaggtacggaagaggaacaagcgacgtatgataacaagctgaaaaaatataatataacctatgaaggcgatgtctatacgacagcgttctatccacatttgaaaactgagctgatccgcagctggcaaaagctttttcactatgatgcagagataaagaaaactaaacggctgccctttgaagatattcaagggggagtatgggaagttaagcaggtttgggtagaatcttttttagaatggaaaatgtaaatgaaccgtccaatttttttggacggttcattttacttatgcaacgcaatttgtttggcgtggatattttttaaaaaggtttgatcgtgctctacaatcagcatcgttggtttgagctgaagtaaaaggtcttctaattgtttttgattaaatacatctagataatttagaggttcatcccaaatatagagttcggctttttgggcaagggattttgctaattcaacttttttccgttgtcccatactcatttcttcgattttattctgaaagacatttcgttccattcccagctttcgcaaattattgagaaacatagaataatctagctggttagcttcagcgaaatcctgcagatcgccgcgattgctttcgtagttttggcgaacataactaattttaacgtttggccgcaggagttctccgtttccttcgcctgcaaaggttcctaataaataatgtaatacgctggattttccgattccgttagggccggtcaatgctgtgatttctcctcgtttcagttcaaaggacaaggatgcaaaaagaggttcttggtcgggataacgtagtgatagctcctcgactttcaaaagctgagcatgtcggctcggttgatagttcatcgttagacgatcgacgtcttctaaatcctttaagagaccttcttttgcttcgatttgatcatacattcgctgctcgatagtttttgagcgtttcattgtccgagcagctcgcgcaccgataaaacctgtatcgaagattccgccactgcctttttccgagggtttgccatatttatctgtttctcgagagcgcgaccattcggctttttcggcagctgtttttttcaaacgaccgacttctttttttattttgcggttttgagcgagctcgaattcatctcgcagctttttttgctcctcataggtagaaaagtttccttgataaagcactaattggcttttttcgatggctaaggtatgatcggtgacctgattcaaaaattgtcgatcatgactgacaacgataaagccatctttgtgttgcaaataattcgcaacatgttgacgaccttgtaggtctaaatgattggtcggttcatcaattagtggaaaaaagtcttcctgtgtaaagagcagcgccaatagaacctttgtttgctcgcctccagaaagagtttgataaggttgccacaaaatttgcgggtctaactgaatcagattcatctctcgttctaattcccatagctcaaaatcagcgacctccagcaatgcgtaataggttaattgttcagcttcgctaacgcttgctggaaaataaaccggacgtaatggaaactgaatatctccttgataggtgtgttttcctaaaagtaattgcagaagggtggtctttccgcgaccattacgaccgactaaacctaatttccaattgctatcaattgttaaattggcgtcattaaacaataaatcgacctgtttatcaaaaccaaaggttaaatgtgtaattttaattgtagacataaaaaaattcccccttttgtttcattagagaaacaaaaaaatcctgaccaatttccaggaaaggattagggcgattcttggctcaatagtaacaagcaggtagaacggctagctcattagaaaggaaattatttttcaaagttcgtgaaaaataattttattctcgtacgcctaccattctgctaaactgcttgttcactatattcgcgaaatttttatattacctattcatgcttagcaaactgcaacaagcacaactggcaacaaaaaaagaccatcccttgaaatcctaagccaatcctgaaaatctgcccactgatcctatcaacaactgtcaatttatgatcggtttgcaacttccaacattcgcttagtttttcaacggcatgatccctcgtttctgtctttgatgaatttattaaaacaaaattctttggctttgtcaaaaaaatacggacgcagccgcttccccaaacatgctacgccctggagtgatcctcgtaaaacgaggcgaagaaaattattcttctataattatagtagcataattttgtgaaaaaaatgtgtttgaacacttgaaatagtttgaagtggagacgttgttaatatttttgttacaatgaaggcaaagaaggaggtggcgggatgaacaatgcaggaatttatcatcgtcccgagagtgagtttgcgtttctttataccaaagatctgatgcggattcgtttgcagacagctcgtgatgacataaaaaccgtggggctgatcagcggagatttttatacctttgctgaagaaaaatggtatcagaaacagcaacctatgaacaaagcctacacgactgataatcacgattattgggagattgaagttaccgcttcccatcaccgtttggcctatgctttttgtattacagatttttcaggtaagcaggttttttatacggatcaagggatttttgactatgaagaacaacgtttaacgcatgataatctctatttccgaatgccttattttcaggaaatcgatcgctttaaggtaccggattgggtagctaaaacggtttggtatcaaatttttccagagcgtttttataatggcgatccctcgaatgatccggaaggttcgcttgcgtggggaagtgaaaaaccgtcccgagagaattttttcggcggtgatttacaaggaatcattgataagctggactatttggaagagttgggtgtgaatggtttatatctttgtccgatttttacctcaccgtcgaatcacaagtatgacaccgttgattattatgaaattgacccgcactttggagacaagcagcttttccgtgagttagtcgaaaaggcgcatgaacgtggaatgcgtgtcatgctggatgcagtattcaatcatcttggggcaagctctcaccagtggcaggatgtgattttacatggacaagagtcagactatgccgattggttccacattgcatcttttccaccaagctataccgcaattcctaattccgaaaacgcgaaaaatttgaactatgatactttcaattttaatccgcatatgccgaagctgaatacagcgaacccggaagttcagaagtatttgctggaaattgcgacctattggattcgtgaatttgatatcgatggttggcggctggacgtagcaaatgaagtggatcatcatttttggaaagagtttcaccaagctgttttgaagcaaaaggaagatttatatattttaggcgaaatttggcattcttctcaacgctggttacagggcgatgaatttcatgcagtgatgaattatgcctttacagataatatcaaagctttctttgtcgagcagtcgatctcaatttcgcaaatgatttttgggatgaatcgccagcagctgctttatcgcgatcaaaccaatgaagtagcctttaatttactagactctcatgatacacctcgtattctgactttgtgtcaaggcaataaggagttgatgaaagcagtcttaacctttatgtttatccaaaaaggaactccgtgtatttattatggcactgaatttggcatggagggcgaaatggacccggattgtcgccgatgcatgatttgggaggagcaggacgaagcgcttttagcatttgtgaagcaattgattgctttgcggaagcagttttcggaagtgttcagctatggaactatgacttggcactatgatgatgacaaaaaggcgttttcactgactcgacagtataaggaaaagactttaagagctatctttaatgaaggagaagcctttgaggttgaaagagcaggaacgcgattgtttgggcagaattaccatgaggatgatgcttatcagttatcgcgtcatggatttgtgattgagaaactgtaagccgttttgattggaaaaaaggaagaagatgaatatagtagatatctgatcagatttaatttttctggaagaaaaaataattacattaataggagtaaggagaagtatctatggaattcatcattcttttattatccgggatcatcggtttgctgcatttggtaattatggggctggaaatgtttgcgccagcggaaaaacaggcaaaaacatttgcaatgccaatgaaatttgtcattcaaaaaaatgcgcaaattgccttaaaaaatatgggcatttataatggcagcttaggattggcactgttgacaagtttgctgctgtttcagggagatataagattgaaggttttgctattactcaatctgtttgtcgtgattgtgggactctatggtggtaagaccgtgacaaaatcgatctatctgatccaagcgctgcctgcgatcattacagttttattcatcctgcttcaattaatttaaagggttcggctaaggagcaagtcctagccgaactttttttgacattaaaggaagtataacattttaagcggtcaaaggattgatacatcaatcttttgaccgcttttcatctggtctttttcctattaaactggagatatgaaacccaatattttacacgccattttctttgatgaatatcaaaactgggagaaattcaatcaaaggtacacaagaaggattcgatccgttgtgaaaagagaagtgaagaagtttcgcgattgtggtgaccttaaaaaaggttatcgtctatttgtctgtgaaggatgccatgatgtaaagaaagtggcttttcgttgtaaagggaaattttgtccaacttgtgcaactggggaaagtcaacggtgggcagaggttgcggcgaatgatctgtttacagtgacgcatcgacacgtcatcttcacgatcgatgaaggtttacgtgagatttttctgaaggagaagtatcgtaaggagcttttaaaaggattaatggatgaagctgcacggatactattagatttttttagaaagcaccatatacaagctggggttgtggcaacactccacaccttcggttctcagctagaatacaatccgcatgttcatttagtcgtcaccatgggtggactgacgaaggatggaaaatggaaggactatgactattttccgttcgcaatgttgaggaaatattggcagaatgcggtcctaaagctcattcgaagaaccttatcccaatgggataaggcacgagtccagccgcttttacaagcggcgtacacgaaaaatgcagagggtttttacgtgcatgcacccaaaaggagccgaacttctctcaaaaagatattagaatatatcagtcgttatatgaaacgtggtcccattgctttaaatcgtatccttttgtacgatgggaaaatagtgatgtttcagtatcatgataaacgaactaacacggataagataaagacgatgtcggcagaggaatttattggtgcactgattcgtcatattccagagaaccagttcaaaacaattcgtagatacggcatttatagtcggcggatcaagacaatcatgaaaaaagtattaagtaattaccagaaagagattcaacgaatgcttgtgaatgtgaagaaagcacttaaaccaaaatcatggtgtgaacgaatagccgaagaattcggagtaaatccattggaatgtactagatgtggcgaatattatgaatttagtggagttagtgtgtctaaaaatggacgacttgtagtgaaatatgcgaagaataaagaatcggaacgattcatgcgagaggagaataaaaaaattggggaagaagcatcgaaacgtaagtatgaaaaagaaaaagaagcagcttttaaaaaacttcgattccaatggagtggttcattacatttgtcttgaatgtgggataaaggaaaaaattccaaaggaagtagttcaatttttggatgcaggagatgttgcatttgatcctgagaacgctccgcaatttgattgcgaaaaatgtggtggagagatgtatccagaatattataagaacgtacttggatacgaatttagaatcagtgatcgacaataaaatgatttatctaaacaaaaagtcctcaggagcggttttctcctgaggttttcttaactgtcttcagccactttagaagaagtaggcagcattgtgttatagtaggaggatcagtcgagagcaatggaggaagaacatgaataataacgatttattattgcgcttaagatatgcgttggatatcaaggatgcggatattataaaagcttttgaattaggtggcttggatatttccagagaagaggaaaaagctatgctgacgaaagtacgtgatcatgagtttgaagaaaatgaaggctttgaaaagaacgtttatgtaaaaatgatcaataataaaaccttggatagctttttgaatggctttattaccttaaaacgcggtgaaccgaaaaataaaatggcgcaggcaccacagcctaaaagcatggaaattaggcatatgaataatgttttattgaaaaaagtgaagattgcgttagcactgaccagtgatgatatactggatattttggctgaggcaggcgtttatccttcaaaaggagagcttggtgctattctaagaaaagaaggacatcgtaatttcaagccctgcggtgataaatatgcgcgaaattttctgaagggattagcactatgctaccgcgagtaattgaataaaataattaagacctgtctttcataataagacaggtctttttctgcgcatatatgtgcagaatgaaattatataatcatcttattgactttatataagtcgcgtattaaactgttagtagattaaataaaacttttttaagaggagaagcgcatgaatcgttgggtttatttattttcagaaggatctaaagaacaaaaggatttattaggtgggaaaggtgctaatctcgctgagatgaccaaattaggactgccagttccaacaggtttcacggttacaacagaagcctgcttacattatttaaaccacggcaaccagctgattgatgaaatgaagaatcaagtgatggaagctgttgaaaaattatcgactaaaacaggaaaaaaattcagtgatttggaaaatccattgctggtttccgtgcgaagcggttcaaaattttcgatgccgggaatgatggacacggttctaaatctaggtttgaatgacaaaacagtcgcggctttagctgaaaacagccagaatgaacgctttgcctatgattgttaccgtcgtctattacagatgttcggaaatgtcgtgatgggcttggataataatgattttgaacatcgcatcacagcactaaaaaaggtgaatggtttaacctttgataatgagttgactgcggatcactggaaacaaattgtaagcgagtacaaagaaatttatcgaaaaaaactgcaacgagaatttccacaggacccgatcgaacaattatatctggcgatcgaagcagtatttggcagttggaataaccaaagagccaagacctatcgtcgccttcatgacatcagtgatgatttaggtacggccgtaaatattcaagaaatggtttttggtaatttcggtgatacttcaggaactggggtcgtcttctcacgcaatccatcgttaggcgatccaggattattcggtgaatatttaatcaatgcgcaaggcgaagatgtggtagccggtgtgcggacgccaaaaccgattcaagtcttagcggatgacatgcctgagcaataccagcagttaaaaggaatctgcgaagatttggaaaaacactaccatgatatgcaggatgttgaatttacgattgaacgggagaaattatttatcctgcaaacccgcagcggtaagcgaacatcgaaggcggcgttaacaatcttgttggatttctacaaagaaggaattatcgatgaaaaggaattaatcagtcggatcgaagcgaaggatttggaagcagccttgcatccaaactttgatgaaaaagaattgaagagtcatgaatccttcttatctggattagcagctagcccgggcgctgcaacaggagcggcatactttactgccgaagcggcgaccgaggctaaagcacgaggagaaagagtcgtcttagtaagggaagaaacttcgccagaggatattgaaggaatcgccgtcagcgaagcggttattaccagccgcggcggaatgacttctcatgcggcagtggttgctcgcggaatgggaatctgttctgtagtgggttgtgaacgactgacggttttagaagaaaataaagcgactgtcggtgacaaggttatcgaggagggcacgatcctttctgtagacggaagcagcggaaatatctactttggtgagattccgatggaagaagtgaccaatactgtcgctttagacgatcttcatgagatttgggagcgtcatgcgaaaattaaggttcgtgccaatgccgaaacgccaaatgatatcgaaactggtatggctttaggggcagttggaatcggcttggcacggacagagcatatgttttttgaaaagagtcgattgttgcagttccgacaattgattttggctgatagcttagacgaacgcttagaagtgttgaaggatttgaaaaaggtccaaaaacaagatttcaaatatatgtatgaagcagctaaaggcaaagcaacgacgattcgtttgcttgacccgccgttgcacgagttcttgccaaaaggtgcggatgagtgccgggaagtggcgaaggagcttggcaagacctataatgaggtgaaacggaaaaccgataatttggctgaagtcaatccaatgctgggcttccgtggtctgcgtttaggtgtagcgtatccagaaatctatcagatgcaagccgaagcgatcattgaagctgcttgcgaagtgacaaaagaaaatgattttgccatccaaccagagatcatgattccatttacgattgatgcgcaagagttcgctcgtgtgcgggcatcgatcgaagaggcaatccaaaaaggtttagaagagcaaaagctcgcggtggattatcaaattggaacaatgatcgaaattccaagagcctgctttgtggccgatgaaattgccaaacatgctgatttcttcagctttggaacgaatgacctgacgcagatggcgctgggcttgtctagagatgattcaccacgaattattaatcaatacatggagacaggaatttttgcggacgacccattccaagtcttagatgaagcgggagtcggtgccttgatgaaattagctattgagcgaggaagacaggtgaatccgaagctgaaaattggaatttgcggtgaagctgcggctcatccaaagtcaatcgccttcttaaataacttgtctatcgattatatttcttgttcgccatttagaataccgcaggcaaaaatgaccttggctcaagcggcgttgtaaaagtagataaaacaagaataaaaaaacaattatatgagttttggattaaaatgtaatatgatttcaaaaagagatagtcttttatgaggctatctcttttttgttattgactgaattattcgaaaacttaatattaatgaaagataacaaataaatgagaaacacaagagttaaatgaatgaaatataatttgtaaacggatacaaccttagttatacttcttataggatttaaatgtgtcatgtcatagaaaaagttctttctttttgaattgcttagataacatattttttttagaaaaaactttatttttgatgaaatttatcttatttaaattaaatgatagttttttcacaatgacttatgaataaaaatacggtataatgctgatttgggaggtgaaacaaactgcggatttaggaatcatagaataacattttgacattcatgagcgatcttttccgttgattgttttgacgtattgcatcctctaaaagggaccgttaattcgtctttttgaaaaaaagttattctaagctgtcaaaatttgagaacgatatttagacatgatctttctaatgaatctaacaggttttaacttgttataaaaaaaagaaagcagggattaaacaatgacaattgattggcaaaaagaagtagaagcacgcaaagacgacttactgaaagacttaggcgatcttatccggatcaacagtattcgcgacgtggaacatggaacaaaagaagaacctcttggacctggaccagcagccgctttacgtaaagtattagaatttggcgatcgcgatggtttcgtgacgaaaaatatcgaaaacgtagccggccatatcgaatacggtgatggagaagaaatgttcggactattaggacatgttgacgtagttcctgtcgatgacaactgggatacagatccatttgaaccagtgatcaaagatggaaaattgtatgcgcgtggttcagctgatgataagggaccttcaatcgctgcttattatgcaatgcgtattatcaaagatttagaattaccaatctcaaaaaaaatccgcttcatcttcggtaccgacgaagaaagtgaatgggtagggattcaccgttatatggaagtagaagaaatgcctaaagtaggtttttctccagatgcacaattcccgattattaatggtgaaaaaggaatcttgtcttatgaagtaactttcgcgcttaaaacgaatgctgaagctggcgactttgatctagtaagcttcaaatcaggtttacgtacgaacatggtaccaggggatgcaacagctgttcttaaagtaaatgatgaagcaaaagttgctgatatgaaggctgcatttgacgcatttatcgaaaaatcagaagtgaagggtgaatttgctgaaaacaacggcgaaatcacgattactgtaattggtaaaggtgctcacgcacaggaaccaaaattcggcgtcaactctgcaacattcttagcagcattcttagctgactacaacttagacggcaatggcgctaactatattcaaacaatcgctgaatatatgcatttagattacaacggtaagaaattaaatgcttacacaaaacacgatgtaatgggtgaaacaacttcatcagcgaacttgttcgattacagtgcagatggcgacaaaaaagttaccttaaatgttcgtcatccagaaggcatcgacaaagatacaatcttagccaacatggaagaagttcttaaagctgcagatgtttcaatcgcaatcatcggtgatgtgaaaactcctcattatgttccagcgactgatccattagtgaaaacattattggacgtttacgaagaacatactggtcttgaaggccacgaagaatcaatcggcgggggtacttacggtcgaatcctagaacgtggtgtcgcatatggcgcaatgttcccaggtgaagaaaacgtaatgcaccaaccaaatgaatttatgcctattgatagcttgttcaaagcaacagctatttatgctgatgctatttatcgcttagttaaatagtcggtattgagagacaggaatcctgtctttacaggattcctcatctcgatggggaaatgatagtaaggaaggaatttcaaagataatgaaaaaactctcaaaagacgcttttggtggagtagcgggaaaagattatgtcccgtatgtagctgataagcctaaaaaagcaggttcaccaatcatcatgattttaggtattttgcttgctgcgttgttcgctgcgtcaactgcttattcaggtatgaaggctggtttaactgtagccgcaggtattccaggcgcaattattggatcagggctagtcgctctatttgtaaaacctaaaacaattttaggtaagaacttattgcaattgatgtcaagtggtggggaatctgtagcatcagggatgattttcgtattgccagccgttattttagtcggtggtaaagtgaacttcatcgaaggtgtcggcttaggaatcggtgctgttttattaggtgtcggtgtattctcaatcgttcaagattacatgctagttagtgaacacggtaaattagtgtatccggaagcaatggcgatctctgaaacattagtcgcttcagatactggcggcgattcactaaaatacatgggaatcggttttggaatcggcggtatcttaactgcattaactggctctgtatttggcattatgaataatgttatcagttatgtaaatgaaagcttctacaaatggaaatttgaaacagaagtaaacccattattagcaggtatcggatttatcgtcggaatggacgtatcagtcttgatgtttgctggttcgatcttagcaaacttcgcgatcgcgccattattaggctacttcatggaaatggctaacagcaatgcccatgtttgggataatgcgtctcaattattgagtgcttcaaactttgcagtgatttccggttcttatgttaaatacatcggtgctggtatgatgatctctggtggattgatcggtgcgattaaattgatcccaacaatcatttcatcaatttctgcaacgatgaaaggtcgtaaagacggtgtcgaacaagaaggcggcggtatgttgccgttgatcgttggtgctgttgtaggtatcgtaatgggcttcgttatcactggaagtgttgcaatggcacttgttggtggtttgttgtcaattatcttaagcttcctattcgttatcgttgcaggtcgtttgactggtacgatcggtacctcaaacttaccagtatctggtatgacgattgcgtcaatggttatcttaacattagtctttgtaatgatgggctggacttcagctgaaaatacacaacaattattgatgtttggtacatttatcgtattagcgatctcagtagctggtggttactctcaatcacaaaaggttacgtttgtaatgggcggaaacttcaacgaaggtcgtcgttacttcttgatttctaacattgtcggtgtggttattgttactggtatgatggtaatcttatctccacaattagcaattactggatcaaatcctccatttggtttgccgcaagcgaacttgatggcgacattgacttcagggattacgtcaggttcacttccatggcatatgatcatcgctggtatcgcaatgggtgttgtattacacttcatgaaggttccaattatgacatttgcgattgggttctatctgccaatctcaacaacgtcaatcatcttagttggtgcgttgatccgtcgcttaatcgatgaattaaacaaaaaagaaacagaagaagttgctgaagaacgtataactttaggtgtcagcttgtcttcaggtttgatcgctggtggttcaatcatcggcttgatcggaatcatcttacaagtaactggcatcatcactccaggaactccttcaggcttcctaggctctaacggttcagcaatcttgctattagtaatcttagttgttgcgatcatcgttcctttattaagtgtgaagaaagtgaaacacaatgactaaagaacagccacaagctgtgaaccctgaaacacaggagctgctaaaacgcgtttatcgcctcaaagaggatctgcattacgaagttcgtgacggtatcgtatttgtcatcacggaacaaaatgcttggattcaacgagtcttacgcaaaattcattataagattccagaaacctcagagatggaattggataaatacggcagctttattcttcaacaaattgatgggaaacggacggttaaggagattggcgaaaaccttggttcagccatagaagaagccaataatcaactgtacgatcgtttattgatttatttgcatcatttagagaagaatgaaaaatatattgaattagtttaagaaagaattccttcaggcgattgcttgaaggaatttttttgcgagttatactttctgcagtttgaggaatcaaaaaagttcttttgagaagcaaacagaagtatttttctgaaatagtttaactgattgatatagacaagaaaaccagcgtattgttcatgcttaaaaataatttctccaaaatgacctagctgttgcttttaaacagaataatctcattttgtctcgaaatttctaaattaatttgaaattatttctaatcccgtttataatgaatctgaggtgataggtatgtctaaaatggcgaacttagaaaagaatctatatgacgattttggaaacaatgagccgatcattatcaaagagattgattcagagaataggtatgatattgataaagattcatttagaaaatacttatctagacttcatgaagaggacaaaattgaacgctttgataatggaatttactattttgccaccttgaatcaatactttaatgaaaaatcaaaattgagtgagaacaaagtcattgaaaagaagtacattcgcgacgacaacgttgtctatggttatataacgggatacagttttgtgaactatttaggtctcacaacccaagtaccacaagtgattgaaattgttacagggaaaatttcaaagtcgatgacggaaaattttagtaccagttataaactaaagaaaaccagagttactatcacaaaggataattataaatttctacaagtactggatcttttgactgattacatgtctttgattgaggcggacattagagtcgttaaagacaaagttttcaattatctaaaggggataaaacttaccgatactgaaataaaaaaaatattgatcgcttatcctgctaaaacatcaaaaagtatttttacagctggttttgatgaaattgtatacagcttaaagaaggaaaatgataatgtatctatatcagagtagaaaactttttgaagatttgatcattagaacagctgaatattttagtctttctgaagaaattattgagaaagactatttcgtttctttatttcttaagagaattgctgaagctaatcccaatattgtctttaaaggcgggacttcactctcaaaggcttatcaactcatcgagcgtttttctgaggatattgatttgtcttattttattaaggatcatggtgccccttctcaaagcaaacgtaaagaattaacgaataccattagaaatgttgccagtgagatgtctttgaagattctgaatgaggatgaaatcagaagtagaaatgtttataatcgctacaatgtcgattattcctcattattcaatcgaggagaccagttaaaatcggctcttattatcgaaacgtatgcccaaaacagttcttttcctgtcaataaaaaggacgtttcgaactacatttttcagatgagttcttcagtgggaatatcggagttggcgaaggattttcctgagctttttccatttaaaatgaatgtgcaaacattggaaagaacatttgcggacaaaatttttgcactctgtgatcactatatgatccgtgaaccgaaacattattcaagacatctgtatgatctatattatctttttcaaaaagagagtatagattgggacagtttttcagagacatttgaggaagtgcgattgattcttcaaaaagatttgaaacgaaatccatcaagtaatcaaacgataaatatcaataatataatatctcagataatgaaggaagatttttacaaagcggactatgaattgagtacaatgtatttggcaaccaacgcaccaaaatatgaagaagtgaaaagagttcttttatcgttcaataatagattgatttaaattcgagtccttcaagttattcgcttgaaggactttttgggctttaaaaatagtaataagcgataagtggaatgacgatctgaagaattaacctcaatctaaaaagtcgtcgtaattacgacgactttttccaacgtttcaactcaggaaagaagctgttcatgaaatccaatgcttcttcttctgttttcccttgttctttcaatatattagcttccttcatatgctgcaggctgacggcgatcatttcttccatcgtgcaatcatcgacaaaagctccgtgcttgtagcaatataagcagtactcactgctttctgagccgtcgtgttcggttccataaactcctttagtcaatggcattccgcaactttggcaataggtcatttcactcattaaaatcctcctcttaataaaatccggtaatcgttttcattgaactttaaccgaactcatcggtagtatttgttataattattctatcagaaaaaaaggatgctcgtccaacttttctaaatttattaagaatcgttgataggtagaataacgagctcttgattgttgaaggaaagtttggttcatcgaataaaaagtagtcctatttttcgaatggcaaacaaaagatactatgaatattaaggagagaagtcaatgaagatcaatcaatttggtttaaaacgtgtctcacttgaagaagcaaagaaagaactggagcaggccggttttttgactattcattctgcaaaggatgcgacgaagttatggtttgaatttttacggaaaagcttcttaactgtccgcgatgatagcggctttatcaataagctgggtaatttcttggcggatgaacagactgatcttagcatgttttatcaagcgaattcttcggtaacgaaggaagttttttatacgatggctctgcagcagttggattttgaaccaacgatcgattttgagccaaagaatgttttagcagaagctgaaaagattggtgttccaatgattgacggtgatttttctaccagagagacacttatcgaagcctggtatttattgttaacgagtcatactaagaatggcttgaattatttagataaattagcttctgaaggctactacgaagataaggaggtcagcaagcctttcttcttcaatgggaaagcgcaggcagtttttgatactgcgcgtttgattcgggaagtagtttacgtggaagctccgctagatacggataaagacgggaaacgagatttactaaaactagagattttacgtcctgctgaaacggaagatgggctacaggtaccgactctatttacggcgagcccttatagtcaaggtgtcaatggaccggcgggagaagagctgacttatgatgtgaatgttccattagagcggaaggaaccaaccgaaacgacttatgaggatattcggtacaaaccggagccagttgagctcccagcagaacgggaagtgaagggcaaggcgacacatgcgaccgaaaccttcactcgtgaaaataatcatagcctgaacgactttttcctagcacgcggcttcgcggtagtttatggttcaggaatcggaacacgagattctgatggcattcaaacctgcggatcggtcgagcagacaaccgcaatggtggcttacattgaatggttggctggcaaccgtcgcgccttcacgaatcggaccgacaatattcgcatcaaggcttggtggagcaataaaaaagtcgcgatgactggaaaatcttatctgggaacgctggcaacagcttgtgcgacacggcaggtggaagggttggaaacaatcatttccgaagcggcgatctctgactggtatcaatattatcgggataatggcttagttattgcgcctggcggattcccaggggaggacgcggatgttttagccatcgagacctttagtaaaatgcgcaatgccggtgattaccttcatagcaagaaattcttcttggactatttgaaggatatggcagaatggcaggatcggaaattcggcaattacaatactttttgggatgaacggaattacttgccattcattaaagatatcaagtgtgatgtggtaatggtccatgggctaaacgactggaatgtgaaaccacgtcaagtcgctgatttatgggatgcgttgaaggaggttcctcttgccaagaaattgatcctgcatcaagggcagcacatctatatcaacaatatgccgtcgtttgatttccaagatatgatgaatctttggttgagtcataagctttacggtattgaaaacaatgctaaagatattttaccggacattgtttatcagaaaaatacagctccagaaacgtgggctacgttgcaggactgggcgcctgccagcgaaaaagtctatcatttaggcgagaagagtctgacaaataacgttgaaacaggacattacaccttcagtgatcaattaccaaaagaacaatatgacagatatacgaaaaatattgaactttgggaaaaagagcttaaagaagaaggaccaatggatgggcaccgctatttagcgaaaacggaagcgttggaggaagcggtcttcttaaatggtcgtcctaaggtaagggtcaaagtagcttcaagtgttgatttaggaatgctgagctttgagttgatcgactttggcaccgcaaaacgcttgaaaccaacaccagacgtggtcgctttacacggattgccattaggtagaaattggcgggaagataatctggtagagttcaaactaggtgcggaagacgattacaagctgatctcccgtggacatatcaatctgcaaaaccgtgagaatgcttggaagaacgacgatctgaaggccaatgaattcgtagagatcgaagtggtcttgcatccgacgatgtatcatctaccagcaggtcgtcaaattggcctagctatttatggaaccgactttggaatgaccgttcgcggcaatcaagacattgattacaccattgatttagccgaatcacaattgattctgccgatgggtgaataaatcctttaaaccaatcacagcttttgtggttgggtttttcttttactaagtatcactagagcaaaatcttagctctccttattattattcttttaaagtcatttggtatatgataggtcacagatacaaaaaggggtggaataatgaaggagcgtgttgtcgtctttggcgatgcgattatcgcgattattctgacgatcatcgttttagaattaccgattcaaacagcggcgaatggtgctgtggatctatattcattatttagagcagtgggaatctattttatcagcttctgctttgtggcaaatctgtggtttcaaacgggttatgcttttaataaaatcaatcaggtaaagaataaggatttagttatttatttactgttgctatttttcttatcattggtaccatctgcgacgcgtttgctgatcgaagatacgacgaagcagactcttttgatttatggcgtattgacgctgaacgtcacgctagtaatgcggcgtttaatcgtagccctaacaggacaagcgataaaagatcaggagcaacgcaaacgacgtatcagtgagttgaataaacaagatatgctttcgattggctttcggatcatcgttttgatttttgggatgttttacgttagaccaacgttgatcgtctatttggttctaccaatcttggcttttttgcaaaatatcatcgatcgcgaagaggatagcttaattgcgacattggacgaggaacagcagattgattatttccaagatcgaaatcaggtctggggcaactcgatgcgacgttattcaagtttactgcgggattctatgaagggcgatgatgctcaaaatcctgatcgctggcagcaggtcatggcagactgggaagagcatgtgacaaaagaaatcaatcgacgcaagcagaatctttcgtcaatgaatgaacatgacaaacgccgcgccgaagcagaaatcaatcgtttagaaaaacaaaaacaacggatagccacgcagaaagctatgaccgaacggcgtttcagtcagcagaaagaacaggaattaaatcgtctcaaaaaaagaaattaattgccaaggcgaagagcagaagagcttttcgtcttggtatttttttcactccgagctataatgagttataaatatcgcaggagagctaggtgagaaggatgtccttaaccatgatcgaacacccaatcaaaatgtatattcgtcgggatctgggaatcactgtcgaacaatttggcaagctcgcaggtattccgcaatcaaccttagcgacatggatcaagcgcgaacggcgagtcgaaaaattgcccatcgacttctacagcgctttagctaccgttcgcaaacagagaattgaaaccgtatacggcgaattattagaatggcagcaacgctacgatcgttacaaacaagaaagtctgcaggcaatcgcagaggagcagcccttattctccttagccgcagaagaggggcggacgatttatcgaatctatcgcaccaatcaaatggagagccaattgctagaaccggctagacgtctaagaaaagccatcgatcagctgaatgcgcaagcatttattcaagtcatgatcgagatttacggaacggtcgaagtaccgatgccgacctggatcgtaaaatcctttaataaaagtgaattgaaggaaatcggtcaggcgttttataatgaattattaataaagggttagacttcggtttatttccaaagatgcttcttttggaatgacgaatactcgaaaaaaagagtgtgacaattacttttgtcgcactctttttatgcatttcattacggctatactgattgtttctttttagttactcgaacgatgccccaaagcaagtgcttctctccagtttaaaagacgaatataggattttgaaaataaaaacaacacgaaaaatatcagctattcctccgaaattgctccttttgatgaagcaagtgttattttgaaaaatcctttctatttagatgaaccgcaacgatgattgctaaaagcaccgcgacacctaccaccataaagaaaccaatgctggagccttttcccggcaagccgcctgtattcattccccaaattccagaaattagtgcggggatggagataatcaaagcggcagagtctaaatatttcatcaagtggtttagattattatccatcatgtcagtgaataatccgccgactgtctctaacaaatcacgataaatatggatcagtttttcggcgtgcttttgatgaagctgaatatcataaaccagttttgaatcattcaagtcctgaatgaaggattcattttcccacagtccgtttaacgtacttttttgatcagcaagagtgtgatcaaggtacacgatttttcgctcggtatctgctaatttaaacaaagcgtcattttcggtcgtttttcttgctgcaacgtccaattcatcaatatccttctttatctctaacaattcttcaatatagtgagtataaagcatatagatgccatacgaaatgagttcggcaaatgtatgaattttctcatgatatttttcaagtagacgatcaataaaggtcgattctttccctacgtgggtgatgagcagcgaatcagaaatgataaaaataagcggctcaagtcgttcttctatttgctctttcttttcagcggataaattagtcactcccaaagcatagctgttattcagcgcggtattttctaatggttccaagcgagaaacctcttctgcatggttgcctccgacaaaaatattctgtggcagccgataatttttaataatttcttcttgctcttccttggtcgcatcctttaaaacaagccagttacctttacctaaggagacctcctggatatgttggttactgatctcaaaatgttgaatcacgtcattcatcctttcaaaaaaatgatatacatttattttttactaataaatagttggaataaagcagaggttatttctaataattacccctgttaattttctataacttatccttaatatattgtcaattaataagcttaaataatgtgaatttgaatattttgagcgaaatatttcaaaaatagaataaaacacgttacgatattattagaaagtgaggaagaaaaattatgaaaccaattttgaaagaccctagagaattattttatgggggctcgtttgagaaacaggatcagaacactcccgcactacaaaccaacatgaagccacaaccagattgcggagaagaaagctatgttggtaatggaaaattagaaaatcgcagagtattgattaccggaggcgactcaggaattggtcgggcggcagcgattgcttatgctcgagaaggtgcagatgtagccattcaattcttccctggtgaagaagaggacgcccaagaggtcgttaagtacattgaagaagctggaagaaaagcagtattgcttccttatgatttacgagatgacgaagcgcctagtgagatcatcaggaaaacagtcgcagaattagatggattggacacacttgtgctaaattctgctcaacaaatttctcaagaatccattgaagaattaccaattcagcaagtagaagatacgttcaaggtaaatattatttcgatgtttgcactcgttcaggaagctttaccgcatttacctgcaggcagcagtattattacaacaacttctgtccaagctttcaatcctagtgatcacttgatggattacgcagcaacgaaagctgctattgcaaacttcacagttggcttagcacaacaattagctaaaaaaggaattcgagtaaatggtgttgcgccaggtccaatctggactccgcttcagttagatcaaggccaacctaaagatgcactaccggaatttggtcaagattcattgctaggacgggcagggcagccagcagaattggcgccagtgtatgttttcctagcttcaaatgatgcaagctatgttactgctcagatttatggtgtcactggaggagaagcgatcaatctgtaaggagggatacgcgatgatacatttaatcgaggcaatcgggatttcgttaattctaaatttgatttctttattgtttaaacgcagacaaccggctgttgcattggcacgtgtgaaaaaacagacaggaacggatcgttaccgttaagcaattaaacaagtcgttaaaaagtttttaaggaggtgcactatgaatcgtggaataaaagcaattgggatcattctttcattgattttgatgtccgtgatgttgatggttattgccatcagttcaccctatttgaatcttccatttggcattggacgtggagagtttttaagaaattcattggcaaattattacttccgccaatacctattttggatcgctttagctgttacagttatcttgcttattgtcattttagttctgatcttttatccaagagttaaacaaacatttgtattaaaagaagacaaaggacgtttatctttagacaaaaaggcaattgaaggttttgttcgttcgaaactacaaggtgtaggctttgtttcatctcctgacgttaaggttcgagcaaccaagaacaagattaaagtgaaagtgaagggtcagctgactcgaacatcatcgttaattgggaaaaccaatgcgctaatgacagaaattcagaatgacttacaagaaattcttggcagtcaggaaaaaatcaaagtgaatgttgcctataagacatttgatgaagaagaaaaaaacaccgcaaatcaatcacgcgtacaataacaaagaccattcatttaatttttaggaatacaggacgacagttaggagggagacagatggaaaaacttatcactcaatacaagctcccaatgatcttcggcggattaggcttgattctggccatattatttgtcacgctgggatttttcaagacactcttgatcgttttattaacagcgcttggcatttggctgggaagctatttagagcaaaccggcatgatggacagctttttcagtcaacgaaagaacaattaatgattcaatcatcatacaaaccaactctataggaggaatttataatggaaaattacaacaaaaacggaatggccgcaggcgttcatatagatacagcaaaaacaaataacaccgcaaacgttaaaggcgaattaacctatgacgacaaagtgattcaaaaaatcgtcggtacagcagtagagcaaatcgatggtctattaacagtcgacggcggatttttctctaatattgctgagaaattagtcaacacagacaatgtgactgccggaatcgaaacagaagtcggcaagaaacaagtcgctgttgatatggatgttgtcattgaatatggtcgtgacattcctaaaatcgcagatcgaatcaaggaagttatccatgatgaagtggagaaaatgacgcatcttgacgtgattgaagtaaatattaacgttgtcgatattaaatcagaatctgaatatcaagaagacagtgaaacggtgcaggacaaagtaacaagcgccgcaaaaacaactggacaatttgcttcaaaacaaacagacaaagctaaaagtgccgtcaatcgcggaacaaacaaagcacaacaaaaaattgaagaaaatcgtgaaccacgagtaaaataatcaaaggagtgaattaacatgggtttattatggtcattaattattggagcagtaatcggagcaatcgctggagcgatcacaggtagaggaaacagcatgggctggatcgctaacatcgtagccggcttagtcggatcagcattaggtcaagcgttactaggatcatgggggccttcattggctggcatggcactggtaccgtcgattattggagcagtcattctggtcttgattgtgtcatttttcttaggcagatcaaaatagatcagtgatgggccacaaagtctcagacaacgttacgaacaagtaacgcagtcatcaaaaagagacgtgatagaacaaaagaaataaggataaatatcaaaagagtgtttcccccgaagaagttttcttatatcaacacagattcagtatcagcagcaagctaaggagtatggattttttaattcaacagagagtgctgttgaaagcgaatcgaatgatttgaatgataaaaggatttcctgtcgttaacttatgaacgatgggaagtccttttttagtgaagcgggagtcatagtacggaaaacgaactgaacatataaggtagttaagaaaagtaaactaaattataagcaattgtataaaagacatctagtttggtgaaaaaagcatcaaaggtgtaaaaaaagaagcgatgattcgcttctttagagagttaattataattcttccttgactgtcttggtgattttttgcagttcatcggtcatttgaccagaatgtttgatgatatctgatacgcgcaggaagctgtttttatacattgccacttcccggaatttcttatatttttcttcgatttcattaaaggtcgcggctttacggtcgtcatgctcgaccgtttccgagctatttacataatgcatccctaaaaatgagagggcatcattgatcccatctaaaaatgcctcgtactcctcttggcgaatcttgccgtcagccaaacgctgcctctgtttttcaataaacatctcaactacttgttccattcccaatcctcctgtcttaacgcattttacttgttgctcatccagtttattgtactatgaaaaggctcacttgtgttataaaaaaatagaatttttttgagtgaattgaaaagataatagattttaaattatcaaagtgaattttcgaaatagtttgacagtttttctttttttgggaataataaacaaaagattaaaaatagctaataaattgttaaattgaaggagacgttcatatggaacaaaataaacgcaagcaactattgaagctgatcgaatccgattgtcgattaagtattgaagaatatgcggtgatgctaggcgaagatgaagtgatcgtttctgctgaaatcaaacgaatggaacaagaaaaaattatttgcggctatcgggctctgattgactgggataaggtggaggatgattggatcgaagctttggttgaggtccaaacaattcctaaaggtgaagaaggctatcgcgagattgcggagcgtgttcggaagtttcctgaagtcaaatcgttctttttcgtcagcggcggctttgactttatcttactgctgcaagggcgcaatatcaaagaaatctcgaaatttatttcgaccaacttagcgtcgattcctgatgtttcaggaacacagacgcatttcttgctagacaaatacaaggagtggggcgtcgacatgtatcaggatgactccgatcctagaattcaggtgagcccatgagaaattttttaacgaaaaaaatcacggatattcaaccctctggtattcgaaaattctttgacattgtttctgatcagccggatgcgatttcccttggtgtcggcgagccggattttgatacgccttctcatatggctcaagaaggggtccgttcgatccaagaagggcggactttctacacggctaacgcgggactgatcgagttgcggaaaaaaatcagcgagtatttgctttatcgcaacaaggttcaatatgatccgaaaacggaggttgtggtcacagtcggcggcagtgaggcgattgatatggcattgcggatttttgttgatccaggagatgaggtcatcattcctcagccaagttttgtttgctacgaaccgattactcagatcgctggcggtacaccagtgacgattgacttacaggcgaagaatcagtttatgctgacgccagaagagttagagaacgttattactgagaaaagcaagattttgattttgtcctatcccaataatccaacgggagcaacgatggatcgcgaagcattgataaagatcgccgatgttgtgaagaagcatgatttattagtcattacggatgaaatttatgcggaattggtttacaacgagcctttcactagtatcgcggagcttccgggaatgcgcgaacggacgattattattaatggtttttcaaaaggctttgcgatgactggctggcgtctgggctttatggctggtccagaagtatttatggagcagttgctgaagctgcatcagtatacgattatggcagcgccgacagcgagtcaatatgcggcattggcaggtttgaaaaacaattggcaggaaacagttgagccgatgcgcttgtcttatgaggaacgtcgaaattatctgcatcatgcgttggaaaagatgggactgccttgttataaggccaagggggcgttttatctctttccgcaggttagtcagtttggcttaagcagtgaagaattcgctctgcgcctattagatgaagaaaagctggcagtagttcccggatcggcctttggaaaaagcggtgaaggattcctgcggctatcgtatgcttattcgatttacgaattaaaagaagcaattcagcgtctagagcgttttgtaatgcggttaaaataagagtacggataggagcgaagaaattcgctccttttctaatgcgaatgttagctaaaagcgattaaaacgtcggtttatctaaaatttctatttatttttaacaaaagcgttcttgggattcctcataaatgataagatgaagccatatcctgggggataagaatgttttaaggaggtttttatgctgtcacgtttcaaacaatcaaagctgttcttttggactgccgagattgtcttaacgattatcgggatttattttttattacaaatgccgaatatttttaaaccagtcgtgggaatggcttctgcgattttgatgccgcttttgatcgcgggttttctttactatatgtttgatccgatcgtggtttttctggaggaaagaggggggctgccacgtgtggttggttttcttgtatcctttattgtaatcgcggcgattatcgcgctgattatgatgaacgctgttccgaaaatgatcgaacaaaccgttcagcttacgcaaaatctacctgtttatgcagaggaatcgggtcgttggattaatgatttagctagtcgagatgaatttaaaaatttcaatttggaagaacaattggcttcagcaaacctgacgattactaaactgatcaaccttgcgattgtcagtgtgacctcaagtttgtcacgaatcgttggtttggcgatgaaattctttgttctcttgttcaccgttccatttattttgattttcatgtttaaagacgggcataaatttttggatgctgtgtcacaattttttcctatcaccattcgtaaagaattacgtcaaacagtgcgcgaactgaatgaaacactttctgcttatatcagcagcacggttttagatgcctttattatcgggatattaagctttatcgcgatgactatttttaaacagccatatagtttactgttggcgcttttttgtgggatcaccaacatcattccttatgttggtccattcatcggggctgttccggcagtgatcgttgggctattcatttcaccgcttcaagcactgtacatgggcatatccgttctggttattcagcagttagatgggaatttgatcaaaccgctattgttcggtaagtcgttgaatattcacccattgactattatattagttttgatcggtgccggcagtgttgcaggaatcgtcggcatgctgatttgtatcccagtgtatgcggtgatcaaaaccttgatcatcaatcttcacaaaatttaccagctacgccgcgaaagtaacttgtttaaagacggtggagagggttagtagcaaagagaaccatcatccaaaatgctggatgacggttctttttttgatttttataagatagcaatagaaaaaataactaattctgatctagatcgtcagaatgatgcaaaattttaccaaatatcggtttatttcgttcgaatttgaaatggtaaatcactagaagaccgataaaccaaaatggagagaaaagtaacgcttcccgtgtatccgaggcaagtgccaaaacgaacaggacaaaggctaagaaagcaaaaatcaaatagcttgaataaggagagaacggtaatttaaaggtatttttggctgccaattcggtctttgttttacgatagcgcatgtgagtaaagacgatcattccccaaataaaaataaagcaaatcgtagcaatcgaactgattatggtgaaaatatgactaggtacgaaaaaatttaagagaaccgcgataaaaatgacgagcgttgagaatactaatgcactacctggaacacgattacgtgtcagcttggtaaaacgactgggtgcactaccttcttgagctaatgaacggaccatccgactggtactgtaaatggcgctattacaagcagacatggcggagcttaatacaactaaattaacaatagatgctgccgcagcgattccaatttctgaaaagacctgaacgaagggactttggtctgctgataagcttgaccaagggtaaatcgacataatcataaataatgagcctagatagaacaaaatgattcgcagcggaatggtattaatcgcttttggcaacaccgatttgggatcagcggtttcgccaccgatcaaaccgaccagttcaaccccgcaaaaagcaaaggtcgccatttgaaaggagagaataaagccacttgcaccttttggaaagaagccgccgtgacgccataaatttccaatatcaacggaaccagcacttgttttgaagccagtaaagatcataaaggcaccggcgataatcaatgcaatgatggcgacgactttgatcagagcaaaccaaaattccagttcaccaaaaagaccaacagcaactaagttcaatcctaatagcaagattaaagcaatgatttccggcagccattgagggatatggggcagccaatagctcacgtatagccccgttgctgttagatcagccatcgcgattgcgatccagcaaaaccagtaagtccatcctgtgacaaaggcagcctttttccctaagtagtcagcgataaaatctaaaaatgaatgataatttacgttcgatagcatcagctcacctaaagcgcgcatgattaagaatataatgcagccggtgattgtgtaggaaagaagaatcgaaggaccagttagttgaatggtttttcccgagccaagaaagagcccagtgccgattgctcctccaattgaaatcaattgaacatgccgattttttagccctctgttcaattcctcatgtgtttccaataaaatcagtcctttttttaagaatagtctgagtttatcaaaaattgtgaaataggttaaagaatatcctttgaagtaacaaagcagcgagaaggctctaataattcaaaaataacaaaaaagaaaaagagttgttaaagattttgcgttaagctgtgtttggaatagctaaaatgctataatattaagaaaattgtgtatcaataccagcttaggacttcaacacgatagctgggtaagaaaaattgaacatatagaaacgaatgagggggagaaccggtttgaacaaaaagacaatcggttggctgattttaggactggttgtgttaggtgctgttgggtttgccggctatcatatttatcaagagaatgttatccagtcagaaaaagaaaataagaaggaactaaatgcgcgcttgactgatctttatgaggatcaaaagtcgggctatttcaaagcggatatctcagctgaagcttttgatgagttagcagatgaagtgaaaagtcaaagcggggaaagtcaaaccttagaagatattgaccaagcgaagaaaaattttaaactccaggctgaaatgaataagctttttgaaaaggatgttctaaatgggctggatctatctgcccaccccgttctaaaggcgcctagcgaagaagatattaaagctttaaaagctgagctagaggaaagtagcgcgaaagacaaggagtggggtaaagacatcagcatgatcctaggcatcgcagaaacacaatcaaaggattttaccaatgcagatgcggatgtgacgaatctagtcaataaaggcactagtttaacactgactgattatttagaaggcgtaaaaaccttggcgatactgccagatggcaagttcaaggagaaactactggagaagctatcaccggtcaaggatcagcttaccaatgagaacgctggttttgcggctaaaattcagcaaagcgatacctcgatggcagcggcagaaaagagctatcaagagcggcaggcgaaagagttggctgctcgcaacaaggaactgacagaactgaaaaaagagttagcagaaaagcaagcgacctatgattcttataaagacatccttgattccattgatgacagtaagaacgatgaatcctcgcgaaaaaaatccgaagaggaatcgcgatcacgagaatctgattcttcccgctcatcaagtttctctagttcaagctctagttcatcagaacagccagacgaggattaaaaaaagagcaacgatttttctaggaaaagtcgttgctcttttttaggttcattttttcgtgtgaagctgagcgatactcttcaaataatgggaaaatctgtgttcgtttcttaatatccagcttaatgaaaatgttgtgaacatgggttttaacggttcctaatgagagaaagagctggtctgcaatttcttgattggttcgatggaataaaagcaattcaaacacttcggtttctctttgcgtgaattggtgagcatgacaaaacttctggatcaacatggcttcctcttgctcttcagagttcacttcctcttgtacatgccgatcctttaagaagaaatggatcatcaacagacagacgacaatggagaaaatgtcttcggaaatgcttcgattgtatattttagtcgttaaggagctgtattgatcgacattaaaaatgacgaagctgtcttcaataacgatcagaatactgaatagaatgctgatgattgataatttttttaggtagcctttatttagcgctggtagctcttttttcgtgcctcgccaacaataaaagcctaaataaaagaggaaaatttggtttcctaaatagtagagccaaaccttaaaggcagaatttggcagtaatgggatcgaaatcatccagacggccaaagcgatcaatagggtgtagtgcagcggagtgagtttttctttccgtaattctgcaataatggaaacggagaagaaggcgttccccataaaaataatagtcttgactgccggcgcgctcataaatgcttggtcatagctttgcgcaaagctattgatgaactctgtcatataaataatgatattatcgaaaataaaaaaagctagataaagactgatcaacaggaacactttgttcttttcctttaaaaaggaatttatcgcaaaagccatggtgatggaataaagaatgatcaaaaggatattgtaaacaaagatggctatcatattgaatcccctttcatttcaggatcaaaaaactgtttttcaacctaagtataacactatttttttctccttcgttccaaaatacgctaaacttttccctaaacttttctaaacccttgaaaaataaaaggtttacatctaaaaataaaccgctggttgacgctcataacggaaaatgttaacgtttacatcctttggcttatcgtaaactcgtactttttctcctacagtaaggatgcaaaagcaaacaaattacttaggaggcgtcaacatggcaaaaagagatttcattacaacagaaaattacacaaaggaggagattcaatacatcgttgatttatcattgaaaatcaaagcttctattaaaaacggtttttatccgccattattgaaagataaagtgttaggcatgatcttccagcaatcttctactagaactcgcgtttcatttgaaacagcgatgacacagttaggcggacacgcagaatacttggcgccaggacaaattcaactaggcggacatgaaacaatcgaagataccagtcgtgtattatctcgtttagtcgatatcttgatggcacgggttgaacgccatcacagtgtgtatgacctagccaacaatgcaacgattccagttatcaatggtatgtctgattttaaccacccaacacaagaattaggcgacctttgtacgatgattgaacacctacctgaaggcaagaaaatcgaagactgcaaaatttccttcattggcgatgctacacaagtatgtttctcattaggtttagtcgcaacaaaaatgggaatggattttgtccaattcggtccagaagggttccaattgaatgacgaccatcgcgcaagattggataagatttgtaaagagtctggcggttcatatactgtttctgatcaaatcgatgtgattgaaggctctgattttgtctatacagatgtttggtatggcttgtatgaagcagaattgtcagaagaagaacgcatgagcactttctatcctaaataccaagtaaacgatgagttaatgaagcgtgcgggtgaaaatgcgaaatttatgcactgcttgcctgcaacacgcggagaagaagtgactgatgaagtgatggacggaccaaactcgatctgtttcgatgaagcagaaaatcgtttaacttcgattcgcggcttgttggtgtacttgatgcacgattatgctgataagaatccaattgatgaaaagaaaaaagcagcagcaaaagcagatttggaagtctttttaggaaaagcactataggcccaagaggtgaggacggaaatgatctgcagctttaagtaaaattcatcaagattatttccattcggggattgaggcaatcctcaatccctgtttcccttgtaccggaaaggaagaaaacaatgggagaaaagaagaaaaaatttagtttgatgagtgcaatcttatccgttatctgtgtcgtgttcgtggcagaggcagcggcgccggttgcggcaattggaaattcacaatttttttggtggatatttctgttagccgcgttccttttaccgtacggtttgatttcttcggagttaggcacgacgtatattggtgatggcgggatttatgactgggtgacccaagccttcggacatcgctggggttcgcgggtatcttggtattattggatcaattatccattgtggctggcttcgctggcagttgtatgtccagatttattaacgacgatcacaggaattgaattttcaacaattccagcaattttaattgaattggtctttatttgggttattgtttggatcagcttctatccagtcgctgacagtgtatggattttgaatggcgcagctgtaattaagatgctgttggcaatcttgattggcgcattaggactttatacgtttgcgacaaaaggcgcagctaatgagtttacattatcgtcaatgctgccaagttttgacctgaatagtttgtcgtttatctcggttatcattttcaacctactaggtttcgaagttatttgtacctttgccgatgacatggaagatccgaagaaacaaattccacaatcaatcattgctggtggtttggtgatcgctgcaatttatattttctctgcattcggaattggtgtcgcaattccaacggatcaaatcagtactggcagcggcttaatggatagcttcaagttattaacaggttctacagggggttggttcatcatcgcgatggcctttctgttcctgctgactctgttcggcaacatgatttcttggtcacttggagtgaacaatacggcttgttacgcagctgaaaacggcgatatgccgaaaatttttgctaaacgtggcggaaaagacgaaatgccgattggtgcagcgattatgaatgggatcgtggcttcagtagtcgtagtgattgcgccaattttgccaaatcaagatctattctgggccttcttctcattgaacctagtaatgttcttgatgtcttacgtacctgtatttcctgcattttacaaattacgtaaaatcgatccagatacaccgcgaccattcaaggttggcggaagcgacgcagtcttgaaagttttggttgcgttaccaatgatcatgattgtcatttcattaatctttacagcgttaccgttgcaatttgatgcggaaacattgagccaacaactaccgattacgatcggagctgtcgtcttcacactatttggtgaagcgattatatgggtgaaaaaaatcaaaaaagagggagtaatttatcatggcgaagagaatcaaaaagacaacaccgaaacaagacgggtttagaatgcccggcgagtacgaaccacaagaaaaggtttggatgatttggcctgagcgtccagataactggcgtgacggtgggaagccagcgcaagaagctttcactgaagtagccaaagccatcagcagatttacaccgatgaacgtggtggtttcgcagcaacagttccaaaactgtcgtcgtcaattaccagaagatatcacggtttatgaaatgtccaataatgacgcgtggattcgcgactgtggcccaagctttgtgatcaacgataaaggcgaattgcgtgggaatgactggggcttcaatgcttggggcggactggttgacggattgtattttccttgggatcaagatgatttagtcgctcaaaaaatctgtgaaatcgaacatgtcgattcttatcggacagatgatttcattttagaaggcggatctttccacgttgatggtgaaggaacggttctagtaactgaaatgtgtctattgagtgaaggacgcaatccgcacatgagcaaagaagagatcgaacaaaaattgtgcgattacttgaactgtgaaaaagtgctttggttaggagacggtattgatccagaagaaacgaatggacacgtggatgatgtagcctgctttgttcgccctggtgaagtggcatgtatttatactgaagataaaaatagtccattttatgaagctgctcaagatgcttataaacgtttaagcgaaatgacagatgcgaaaggccgcaaattgaaggttcataaaatctgttgcccaatcgaaaacgttacaatcgacggcaacttcaagattgattatgttgaaggaacaatgccacgtgaggatggcgacatctgtatcgcttcttacatgaacttcttaattaccaataacggcgtcatcgtgccgcaatatggtgacaagaatgatgcattagctttagaacaattagaaatgattttcccagataaagaagttgtgggtgtaaatacagtagaaatcgtctacggcggcggaaatattcattgtattacacagcaacaaccacaaagataggagcctgtcatgtcaaaaatcgttatcgcattaggcggaaacgcattaggcaattccgcgaatgagcaattaaccaaagctgaattagcagcgaaatccatcgctgatctgatcactgcggggcaccatgtcgtgatcgctcacggcaatggtccccaggttgggaaaatccgtttagcctttgaagaaaccagtcaaaagccggaggatacgatgccgtttccagaatgtacggccatgagtcaaggctatatcggctatcacctgcagcaggccattgatgaagaattggtttctcgcggcttaacagatattccagttgtatctatgctgacgcaggtggtggttgacccgaaagatccggcattttcgaatccaaccaaaccgattggcggctattacagcgaagaagaatcaaaaaaactgatggctgaaacgggcgatgtttatgttgaagatgctggccgcggctggcgtcgggtagtaccatcaccaaaaccagtagatatctacgaaaaaatcagcctacaaaccttagtcgacgcggggcaagtcgtgatcgcttgtggtggaggaggcattccagtcatttacgaaggcacgcgctataaaggcgtcgatgccgtaatcgataaggattttgccgcagcgaaaatggctgcattgatcgatgctgatgtcttcattattttgacagctgttgatcatgtctttgtcaacttcggcaaaccggatcaaaaagctttggaaacaacttccgtggctgatatgaaacaatatattagcgaagatcaattcgctccaggaagtatgttgccaaaagtagaagctgcgattgacttcgccgaatcaaaagccggtcgacgtgcgatcatcgcttcattagaaaaagcttcagaaacactggatggaaacagcggaacaaccgtgcagatgtaaaataaaaacccatctctcttttttcataaagagagatgggctttttggatatacagttttacgatgttttttagtagattgtagttaaaagagaaattgtcataagacttacaaacttaaataaaagtattcattctatggttattctgtaatcttagctaataaactatccacatctctttttatcaaactttgcatactttctttatactgacttaaatccaaagctgccagcttttcctgaatcaccgggattaattctggcttggcctctgctaaataaatcaaataaggaatacattgacgaacaatcggtgctttgggatcgtctagaacagctaaaatttctgcgagatatgtctcaatgactttttgtgaatcccaacgcgcattaatcataaaaaacttaaaggttcgtccacgtccacaggctctttcagcggtcagagcaggaaggaacgtttctagacggtcagcgtaaagcggttcagatagacactgttcttccaattctttaaatttgttcatggcttttttggtgtctttagcagtcaaaagcgctaatatcgtttccataaaaaaatcctttctagagtaaaacagtcgtcaatgcgacgactgttttttaatcctcatctttttctttttcctgcaactgttttttcagatcattgatttgtttatcgaggtctttgctttgatttttcgtatcatcgatttgatcttttaccgaatttaatgctgaattccgggcttctttttcacgggcgtactcgacttccttattgcgataaacatttgtatattgatcagacagcgttccgccagagggttcgacttgttgaaccaaagcgtatacctgctgtgcatattggtcgaaggtttgccagttgtcttgtgtatctgtcacaataagctcgaactgacttaaggtattaatccgttcagagatcaattgattactgaaggtggaagcttcttctaccatcggtgtattcaatttcgctgttgtcaattcattggctttttgttttgccaaggtgtcgatattggctgtcgctgcctgtaaggcattttgacgggctgccagtacttgttttgtttgactggagcgtgtaactaattggttgccaactttttgtacggaagagggcatctgaaaatcaacatcttctttgccgttatttaagagatccatcgtttgcttgaagatttctttggtcgcctgtccgacactggcattgtcttgcggttgcggtgtgtcgtcgccggcccagaccgcaacggtatagtgcggagtcgctccgacagtccataaatcttttgcttcgtcagtcgtaccggttttgactgcccaaaattgattatgtgctagggtcaagcctgccgctgttccatccgcattttcatgaacggctttcatcgtatcaatcgttaaataagctgcgtcatcgctgtaaatcttttgctgcgcaatatcatttttggagaaaatctcctgaccattgtctttccgtttaatggtttgaatatttaatggggcacgataatttccttgatttactaatgttgcgatcccactagccatttcttgagtagtggctccgtaggtcatcccgccgaccgcaataatcggattgtcatctgccacgtcaagaccggtaaattgcatttgtgccaaaggctgatagacggcttccttcagctcattgcgattttcgtctgctagtttatacgcgacaacgtttgaggaaatcgctaaggcatttctcagtgtcagattccctttagaactattataaacattatttggatacgtattatttggccgatcatctgaaacgacactggtttctagcaagccacgctcatacgcaggggcgtaggaaactaggggtttgatcgccgagccaggctgacgataggaaagaaaggcacgattataatgatttccttcctcaccgcggccaccgatactagcaacaacatcgcctgtttgattatcgatgacagtcatggcagcctgcttggtatagaaattattatcgccgctacgatcttgccaagcattcatcacattgctgacaatcccttgcagctgatcgtgtaagccagtatcgatattggtactgatttgatagccgcctgagagaatccgttgatataccttattataagcagagctgtattcctcgttataacgatcttcttcttctttggagtcaaactggtattggaaacggaaatcctgctgtcccatcaaaattttagttgcagaatcaactgctaaggcaacttcgttattgtctaattgattgttaagtgcattactgtgaattttagcttcaaaatcatctgcaacagctttatcatattggtcctttgtgatgtagccctgctgattcatttcttttaagatcaatttggctcttttcaatgcatttttcttattgtcagtaggatcaaatatacctggattatttgtaattcctactaatacagctttttccaacagactggtgtcattgattgatttaccaaaataaacctttgctgccgcattgattccataagcgccatgtccgaaataaacgttattcagataatattctaaaatctgatgtttggtaaatttcttttctaatgattgtgccatcaccatttcttcaattttacgagagattgagacttcgggtgttagatagatatttttcaccaattgctgagtgatagtagatgctccgcggattccacgccctgtcgcagcatttatcgcaacggtcaatagcccttgcgtgtctactccgtgatgctcataaaatcgcttatcttcaatagcgatcagcgcctgggagactaatgggtccatcttgtcataagtcaggtaatcccgttcttgcgtttttagttccttgataacttgaccattcttatctaagacggttgttggatggtactgcttaaagtcgctctcttgaatagaggctgcatgctcttcacccgcatcaatggcggcagttacttctttgccgtatttttgaaagaagaagatggtgcctgccaccaccataagcagcatgactgccagaatactaagtgaaatcttagtggatttcgctagttttcctcgaggggacttttttcgcactcgtggtgttttcatttctttttttcgttgatgtcgttcttgtctgtttgccatatttgcctatccttatttcagttattgtatttatttcttctctcgggaaaaaataagttttatgttcatgccaaataccattctgctagttatacttagtgttatttagttaattcataatcgaatttacgaatcagtaaaagcagagctggcaacctgataaaatcatttcttctagtgtaatagaaaatgacgagaataactatgataatcatatttttccaagaaaaatttagattatttcataaaataggctgatattcactggaaatacttgacgcttgcttaatttgtcgccacaataaggaggagatgaggtgacctatgaatacatcaaaaaaatggttgatcttttggggcgtactggctgcgctgtttgtcggtaccttcggtgtcatattaagcgggaattttccgcaatttacgattcctttcagtgtttttgctagtgacgataagggcaagaataaggaggagttgccgaaattaaaggtattggcattaagggatgtcaatgatcaaacattattagatgaacaaattgaaaaagttgatgcgctaaataaagcatttgcacaggacaataatagcttttccagctctcaaacgatggctgacacaattgaaaaaatctatggacccgcgaaggatggaaaggatatttttaatctctatcgaaaaatctatccgatggtcagttcgcaagagaacggctttgttagcataagtttgattgggtttgggcagcgtctgattgacgatgagccaatgtcgattcagagacaaatttggagctttaccgatacaaatggaacgcgccatgattataccgtaagtctgcgctttaatggaaacgagttagcagaactttcagccgaggacggcggtgaggtgaaatcagttattactaaagatgatacctatcttgataaatctgctgatttcgagacagcttggacggaagttgttcgccgtggaacggatacacaattatatcgagaaatgaagaaagctggaatggacagcaaccaaacagaatttaaagcattagaaaaaagtatcgaattgacggacccaagtggatttttcgaactattcaaggacactagaggggatcttgcacatgcatacctatctggtttctatcatacaaatacaccgacggatgggcaatctgattactatttccgcgtaccgacatctgaaaaagaggttgcagaatttgtcgtggtttatgatcgtttgcagcaaaaaattgtctcgattaaccgtcagtagaaaagttatcacaaattcattttttacaaaataataatcgtaagggagctgtgacaaacgtcttgtcacagcttcttttttccgcataaattctgttcaaaaatagctttttaaaaaataagccgaaatttcacaaaaatttgaaaaacaacgagtaggaaccattttttagtggataaactccttgagtatcaacaagatttcaggttttaagagatctgctttacaattgaattattgaaaatattataaaatatatggtatatagcgaaaattttttatcaaaattcaaagattatttttgaattttgacggaatatagatatttatcacaaatattgttatattctaaccaacaggaataacccaaagattcacaatcttagaggcggagaaaattgagagagcaaatcctgttatcgagcataccattttggtgtgagaacttgatggggggtggtacatgggattttacttctgtttttggccaaaaacaatctccgaaaaataaatagactactatctttcaaggtagtagtctaaatcgttagggtaaggttatttgttgtgcatttcttgcgcttgggtaagagcagaaaaggagagggaaatgaaaagaaaaggattgatgaaaaagttaaaagggatcatgtcgttggtgacgcttttgatcatgacggtatcttcgttaggggtaccggctcaagtgtttgcggcagatagtaaggttcctgcaaatttaacagctaaacatgatgatacgcaaaaatggacggtgattcaatttgaccaagtagataatgccgaaagctacaatatttatcgttcagaatcacaagatggggaatttaaacgtgtccaaacattaaagagtgacaaaacatttacagctgataattatatggatttaaagactagcggtacacttaaggctgattatctttattactataaagtttcagctgttgtggatggtaaggaacaagttgcgactgctccgattgccaatcaagaggttataacacaatcaagtgaatcgaaaatggaagaagaggcaccaacagcggctaccactgaagagacagcacaagaatcttctgatgtccaagcttatggagcagcaaaacataacacaggttgtgacggtaagcatagtgggcgcacgtgcaacaacaatgcggggaaacatgatgagtattgtgacaaaaaccatagtaaatatcgtaagtgtaattccaacaattggaagcatgacgaggactgtgataaaaagcacagcggaaaaaactgcaataaaaataattgcaagcatgacgaatattgcgataaaaatcacaatggcggaagttgcaatgacaataaatggtgccataaaccaacctgcgatgaaaagcacagtgggcataactgcaataacaattggaaacaccatgaagattgcgataagaaacataacggaaaagattgtaatcaaaacaactacaaagaaaaatgggatgcagttaagaatgtttgtgtgacggaaactcaacatcactggttaaagcttagctgggaatcaaaaggcagcaatgctgaatataaaatcttccgtgcaacgaagaaatgcaacgattaccaatccggtgattttaaagaaattgctacagtaacaggaaaaaccacgtataacgatatcaagttgaaccataaccaaacatattgctacaaagtaatggtgaaacgtccgaaagcttgtccatacacgatcgaaactgttaacagctcaaacatcggcaaatttactgtttgcgcgactacattgaatccaaacattaaagcagccgctgtttctgacaaagcgatcaaagtaacctggacaaataccaagagtgataatgcttcaacacgttatgcaacaggctatacattgtatcgcagcacaacgaacaatattaacaatgcgaccgcgatcaatgttgctggtaaacaagatggttctgaaatgacttatacagacaatggattgaaccaatgcacgacgtactattactgggtaaaagcaaattacggtcaatggagtagctgggttagcccacaatggggaccaagctgtgcgacaacacttaagaaaaaagaaattggcaccggattaaacggctgtatcaagaatgttttgaaatgcggctgtattccaactcgctactacggtgcgcaaattttcttaggtactcaaaatccaaattcattagactatacgaaagttcttgtttatcgtagaacagccggctgcggatacagctcagcgtacaagataattgatgttcgctatgcgaaatatatgaatggcgcttttggaaaaggatactatctcgactactcgttgagtcaagtttgcctatcacgaggcacttactacttcgcaattcaagcagttggttctgattgcgggaaagatatcaccggaccaatgaaagaaatcggttgtgtgactgtaagatggtaagctaacgagacgttggtcaaattagggttgggggttaaaaagtgttttaaaaaagaaagaaacccgtttttgattcgttttctaaatagcaagatcgtccaaaaaagtgttaggagagggttctcctaacactttttaatgtattttaatcgataaggatcgcttcatgtcctgtatagggtaagaatttttcaaacaaatccgcggttttcagcttcatataatttgtgatcgacccagagctgcaggcataccattcacgttcagaaacagatttatcaaagaccaattggatttcatgttcagggtccttcaataagccaaaaattgtcgcagcacccggaataacgcctaagcgttcttttagcagttcggctgaagcaaaggaaacacggggaatttccaattttttaccaaactctttggtgacaaatttgaaattggctggtgtgatgtacaaataaaatttcgtcttcttttgattacataagaaaattgttttgacaacttcaacccccagacgtttatcaatatcgatacaatcttccatggtaagtgcctctccagtagctacttgataaaaaggcatctctaactttgtcagtatttcgtacgttttttcttctaattcagaaccaaattctttcggcggggtagtagacatttcactaacgtaaaccataacggcctcctttttgcttgtgataaatgttacaatacccgttttttagtgaatactcaagctataatgattattttgctgtattttctaactctttttttacaagtacttccaagacattttcaatagcattgaaatcagttccgcagagatttgcccggataatcacatatttcttatcctctaattgaaggtccttacaacctggagatgtaccaataatcagctgagccttgttaggatcttcaacgaatttcagatggtaacgatttttgaaatgcaaattgattttttcttggataaaaacactgaaaagttcattatgttcagaaaatgcataaaccgaaatttcaggtaaacaattttcaaatgaatagagcgtcacacaagttaaaaatgaaaatatccgtaattgacgatgtgcaaatccgggggcggcttcagtgaaatcctcccagaaggcatcaaatcgacgataataataaggacactgtgtttgcaaattgtctaaggcaaaattgttttttaagtgttcgagcatttgatcgtttaagcggaaaaaaatcaacgaagcgtaatgctgttttagcttacgcgcaattactttttgttcgcgagtgcttaatggacgaaaatgacgtgaaaaattggtagtccaatgagtaatcacttgagtgaaaaaggattcatcgacagtgttttttggctgtagttcaaaattattcaattgagagctataaatcgcataaaggaaaaacttccattcatgcgtattccaagtctttaagaaagacggcttttttggatatttgaattgattgagccagtcattttcgatttcattaaacgaaagtgttccttttttacttaaggattgattcgtgattaacaaccaaaaacagatcatttctgaattggctggattatttgtgagctttaagtattcttcaatttgtcttgctaattgaagatagcttttagtattgagccattcaatttgagtgaattgataataaagacctctgacaaaaatgtagtagaagcgacggatatcaacttcacgtccttttaagctgattttagtcgagcaggagacatagagatcataatcagtaagctcttgattgatctccttaatttttcgtcgcaattttgattcgctgatgtttttctccatacagaactgaatagcggatattttccgtcttgctaggactgcccggataatttcacaggcgagatcatgctggtacaaatagcttatcaatgattggaggttggttgaggtccgatccaattggataccacgaccattatccatgcgaagtcttaatgaatagtctttatcgatatagagatcttcgattatcgattgcaattctttgcaatttactcggatcgtgccgagactagcatgaccgattatttcttgtaattctttcatagagatcggcgtttgcaaagcatccaacgtttcaatgatctgaattttcaacaatgtatttctatccattccaagcatgaactatcctcctattcttatttgataaaaattaacctcgttgttttatatgataaattaaaatatcacttaatacaaataataaattaataaacggtgaaaaataaagctttttctctaaattttttttaaaaatctaccatttaaaataaccttgattattttttaacgatagaaatcatgaatggagtttttatgtaaatgtttagaaagctgagaaacaggccttagcaaagtactctccgaaacttgtgaaaacatgcaaaaatagcagccataagacgatcatttcttgtaaataaatgagttttgttagtaattttttatgaaagctgtcgtttccgctttcattctaaggtataataaatctaaaaggagtcggcaatgagaatctcagaaatgaaaaatattggtgttgtaaatgaagagaagttagctcaggtagggattgttgaaccagaccagctgcgaaaattgggtacagaggcagcttttttaaagatccgacatctagtagatgatggcgcttgtctgcatctcttgtatggattggaaggagcgatccaagatattcctaaaagagagttaagtgagcgaagaaaagctgagttacgtgatttttttaaacagctaaattagatttgattgagcaggcttgctgaatattctttttcacgttacactacagacaaaaaaggaagtgaccttttgtatctgattgcattagtcgtcttcatcattttagttggcgtatataatgtttttcttagtctttcacgacgaagaaaaaatacgataacgccattaatggtgaatatccaggtaacgttaaatatcgtattagtagttgcaggcttaatctacttgatttttggataagaaaaagaggaagacggctgtcattcctcttttttatggtgtttgtcagggacatattatttaacgagcagaaacgatttgtgcgccaaatggcatcaaagctagttgagcaagtttcaatgattgagcggcaaaaggaataccgacaatcgtaatacataaaaatagggcgctgactaaatgtcccaaagccaaaggaacgcctgaaacgatcaaccaaataatattgacgataaagtttactccagtcgtgtggtaaacgatgtctttaccaaacggagcaaagcttaaactagcaaatttgaagcattgtaaaccaattgggataccgatgatcgtgatgcaccataagatgccggcgagacaccaagtcaaaccgccgatcagtccaccaaagatgaaccagataatatttcctaagcaagacatattttttccctccatttaccaatagtgtatcatgatttcaaaaatctacctccaacttaggatggaaattcgagagaaatagaagataaaatcaaatggcactagaaaagtcattagtcgatttttagaaaggaaatgaacatgttagaaaaatttgaaatactttctgttgatcagaaaacagcagtgcaaggctaccattggacctgtgagaagccgtgggcggtacttcagctgacacacggaatggcagagcatttaatgcgttatgaaatcttagcaaaatacttaaatgaacgaaacatcgcggtgatcggacatgatcatcttggtcacggggcatctgtctctgctccaaaaggacttcaaggttattttcatgatgaaaagatcaaacatggattggttcaggacttgtatcaggtaactcagtgggggaaaaagcagtattctgatattcctttttttcttctaggacatagtatgggttcattcgttgtaagaaattatctatatgaatacggtgaggcgatcaatggggcaattctcgtaggaacgggtcagcagccagcttggctggcccgttttggccaacgttcagcaaaactattaagtaaaattcaaggagaaaagcacccaagcaaactaattgatcaattagctttcggcaatatgaatcgaaaaattgtcaataagcggacggataaggattggctgtccagcctttcggaagaggtagatgcttacttagctgatccgaagtgcggattcttatttaccttgagcgcttatcacgaattattttcattgattattcgttcgcaggagcctgagttgctgcaacgggtgccgaaaaatcttccattattgttcttatctggaaaagaagatcctgtcggagaatacggtaaaggcgtgatgaaagcagcaaagacttatcaagcagctggtgtgaagcaggtgacggtcaagctttatgaaaatgcccgccacgaactgctaaatgaagctcaaaaacttacagtttttcatgatatttgcaaatggatggaaaaaaattctggaaaatgatattattgtaaaaattttaggtaattgagggattctatgaaagcagaatttttgattgattattgccatcaaggtgactggcagccgcagggtggtttgcggcaatcaccgatcgacatccaaacatctttggtccaagacaatgatgagacccttgcaactatacaagtaaatttttcagataagactgcaacattttttaataatggacaaaatctgcaactattgggagtgggtgaagcgacattcaataagcgcttatttcattttgttcaaatgcactttcatgctgattccgagcaccgtataaatggaaaaagttttccgttggaaggccactttcttttccagtctcctagtggagaggtggcagttatcggagtcttctatcaggctggagaatacaattctgattttgaaagcatcttgaaccagtatgaccagcaaaaaggagagggaactttttctgttgacgaattgattcccgaaaataaaagctattatcattacattggctctttaacgactccgccgttgactgaaggcgtagaatggtacgtcatgaagaatgtattagaagtatccgctgaacagcttcagcgcttcatcgatattcacggacgaaataatcgagaatgtcagctgatcaatgaacgtaaagtattcagctataacgaataaagtcgctaccaaattggtaacgacttctttcgtatgcatatttttaagctagatattcctttaaaacaaaggcaacgccggaatcttgatttgacttggtcagcttatctgcgactttttttacggcaggagccgcattttccatcgcgatactatttccgctgatttccaacatttctagatcattttcttgatcaccaaaggcaataacctctgagagctccatggataaataattcgttaaaaatttcagagccgcacctttattaaccccatcagccatcacttctaaccaatacttatcagagtaagaactattgatctgtttcatttctaattgcgagcgtagtttgaccaatttactcgtgtcactatctgtaaaggccaatttgaaatagctgatcgcctctttatcgatttgttcccacaaatcttctgcttttgattcctttaagttaaattgtgcgtaatagggactgttgacttcatttttatcctgtgcaaatgaaatgcgatcatcttgcgtcgcacgactagcgacgacggtcacaccagatttcatggcaagagagagggctgtttttacagtttcgggaataattgtataatttttcaatacctctttaatttctccctgttcaattcgtgctacatacgcaccattagaagctaaagtgtagccgctcaaatttaattgtgcaaatacttccttggcagactgaatcgatcggcctgtagccaaggcgactgttcccccttgctgatcgaatttttttaatgcccaggcattttcttcagggacatgtccttctttgtttagtaaggtgccatcaagatctactgctaccaatttcatctatatccgtccttttttaatcatttaacttaagagtagactaattttctgaaaatgaacaattaaacgctcagtagttctcaattgattaataaaaacaataattataataaaaactttaggaaaaattaataattagaaaattaggctaaatactagggttttaagtgactttttgaataaatgataggggtatcaaagcataaattttgcttaatccatctaataggtctaatctgaattttgtaaacaatgttattaatagaacaaaatattagataggagtgaagattttatgatctcgaaaatcgaggaaattcccgtggtcacagctgctgatgaaaattatgctccttatctgagtgtaatgatttcaaccttactcgaaaatacttcaagaaaaacacccattcgtttctttgttattgatgatgacttatccgtttctagtaaagaaaaattgattcaaacagtacacaagttttctgatgtagctgttattcaatttgtgaaggtggatgaaaaagactacgaagatttcttggtaagcgaccatattacgacgaccgcttattttagaatctccatgccaaagcttttggcgaaaaaaaattatcgaaaaattctatatattgattcagataccttcgtccttgatgatgtacaaaagctttatgaacaaagtttagaaggaaaaacaatcggcgcgattattgatcctggtcagacggaagcattagaacgtttagggattgactcagacgattattacttcaattctggtgtaatggtgattgatgttgatcaatggaaccaacagcagatcactgaaaagaccattgactatttaaaaaatcatggagataaaatcatttaccatgaccaagatgctttgaatgctgttttatatgaaaattggcatccattccatcctcgctggaatatgcaaagctcgctgatttttgataagcatccagcaccaacgctggagtataagcaagcttatgaagcaggacgaaaaaatccagcggtcgttcattttactgggcatgataaaccttggaacaccttggagggtcatccttatcaagacgagtatatggattacttgaacaaaagtatttttatgaagacggtgaatgtaaaatgaaaaataacaaaataacaatcgtatcaagctgcaatgatgcctttgcggagcatgtatcggcacttttcgtttcagttttagaaaatacagatcgttcaacgaagctttttgatttttatgtgatcgacgatgagattagtattgctaataaacgcttgatgcgtgaaacactcaaagaatatgatgcaatgctgcacttcttgaccatcgataaaaaatacttttcagatgcggtggaaagtgaacggattccggaaactgcctattatcgaattgctattccagaattattcagcgaccaaaaccttgagcgaattctctacttagattgtgatatgatcgctttaggtgatatctcagaactttgggagattgatttgtctgattatacattggcagcggtggaagatgcaggatttcatcatcgcttagaaaaaatggacattgcttgcagttcaacgaagtattttaattcaggctttatgttgatcaatatggaaaaatggcttactggcaatgtgacgaagcgagtaatgcagtttatccatgataatcctgaaaaactaaaatttcatgaccaagacgccttgaatgcaatcttacatgaccaatggctgcagcttcatccaaaatggaatgcccagagctatatcatgaagcgtgaggtggagcatccagatcctgaaggtgaaaaggaatatttcgagacccgcagagatcctaaaattattcattattcaggacatgtgaaaccctggagcccagagtttacctcatcattgaagaaatactacgaagaatacgaagagttgactgccttcactgacgaagaagaagtttctgcagcaaaagcatcttcaactaggaagcttggctaatgcggtgaactgcacaaacgaaatcaaaaggaggggaaatcacgatggtaaacgtatttaaaaatacttgggatcgccccaaaaatcattctcgataccataaatcaaacaaaaagaatgcagcaaaaaaagacagcgcggttcgatccttgctctttaaaattctatccgtgttcgtcattggttttcttactaagaaaatcaaggaacgaaaaaaataaccaataagtataacctgaaggccataagagattttcatttctcttaaggcttttttgtttattcccgtgattttgtgggtctgtgcttgatttgcggttcgattagctccgccataatatgatgaagctgttccttttggaaatcatcgttttattaagcaacaattctaaaaatagttcaattcaacaagtcgaaaaaagactgaaaatagctctttttacggagtattttcagtcttttaaaattataatgtgatttctgtattaatgattcgtttgatacctaaccaatgaagttctaaagaagctttctgcgatgtaatatttgttttgtgctaaaactttcccattcgttgcatataaatcttcagtcattaaaactagcttttcgttctctgcgaaatttcgtctaaaactatcaggttttctggaagagatactaatggttagctttgaattagccacttcacgataaatatctttttctagaaattgaatgatttgatttttatcatctagattaaagccaaatttttcgattgtttcaggtaatagaattgaaaaaatatttgctatgttcgagttatcaattttataccagacatttaatgtgtagtaggagatatctttaacttcaaacaatttatcagtaaaaacactactgggatttttaaaataatacgcgtctttctctgaaatttgctcaattggtatcgtcaagctatctaacactggacaacctaacgtacggataccttgatcatttttttgtttatcagaaaaattaacaaaatgaccttgtccgtgaatactactaattacaccatcctcttttaatagggataaagcggttcttaaggtcacacgacttacattgaaatcattggttaacttttcctctgaaggcaattttgaaccaggtgcaaactgtgaccgcttgatcattgacaaaatttggttataaacttgaacatactttggcgtacgatgcatctccatcaccattcctcataaataaatataattgcattgtatcataatctttatttacagttactgattggatagacatattcaataaaagtaccgaattgttcacgcccagccatttcatattttctacaaggaataaaattcaaacttgttactaaatttttgatagggatatttgaagtattcgtactaatttttatttgtgttatttcgctctcgttttcttctttttggagaatatctttcaaaataaaccgtgccaatccatttctttgatgagaggagcttactactaaacgttgaataaacgtagtgccggcaactctagaaatggtaacacaagcatcaaaatgttctccgtaaatccataattgctgatgctcaatatcctgaaggattacattcctattaggataggagtcatcccattgcgtaataccagctgcagtcatttgcctttttccatcattaatgagtgctaggatattctgataatcactaaattgagcgattcttttactatagaacatttatctattgaaataaaataagcgataacactaaggatagaacgaccccgaaaatcatcggaactgaggttcttcggacgatttgcataggtgaaagtttcgttgttcctgcagcaatcaggataacagctgcaactggtgaaactgctcgtagcaggttacccgaaagttgcattggaatagataaagcaacgggatcgattccagcagccttagaaagtggaatcattaacgggatcattgcgaataagagggctgttccactaccgcttaataagacaatcactgctgtaaaggcaaccatgataactggtaacaggattccagcaccgctgatattctccatggccttttgaacaagttcgatgataccaattgaggtgaggccttgaacaaagacttgcgctgccactaacagtgcaacgatactcataacaccacccataccttcaaagaagaagctagtttcttttaagacagaatttacagaacgatgcgtagtaaattcaactaacacggcaatcataaagctgattaaactgacaacctgtacgctgatgtttaaagaggtccccaaaagaatatttgctacaaatacgaagagtaacaaaataatcggtaataacggtaaggtaccgtatataaatgctttagcaccagaataggttgatgtaatcgtcatgtttgtttctggagaaccatttgctgtaagttcttcttcataagtcaatatttctttttccttgatgtcttcatgcttttgccaaaaataatgaacaacagcaattgctaataaggtaggaattgaaacaatagcatgactcctaaaaacatagtctgtaacgtttacatttaataacgaagcgattgcaacattatcagaacctagtggtgttggtacgatcgttgcagaggtaccgattatcgctgcagcactcaaacgtgacatacccgctgttcgtaaaacagggtatagcgtcgctaatagaattattgccaaatttgaggcactgggtataaccaaggatagtaaatttccaatcaaaaaaacaattgggattaaaatataaattgatttgattttcgaaataggtttcgtcagcgcttgaacggttactttgtttgcgccgatgtgattcatgtaggcactgtagccccctaaaattagaatgacaaaaccaggaccgactaaagtatttgtaaactggtcgacaattacttgaaaaggatcaagtaaaagagctccagtagtctcgctaacttctagttttcttcccatcaataaagcaacgtacatcaaaattacacctaagatcagtaaggtcatttttatatcatttttctttagaagcatatacactaaaataccaactgccaatatgccgacaacacaagttaataaaacatccatattatatcaaccacactttcattttatagttttagcaatagaatgaataaaccactcttcaaattgctttggatcaacgctgattgctacttcagcattagcaggtaattttaagtaaccttttaaatcaattaaggaagcaccagcagtcaaaggactggtagtttctatttcgattctagttgaaacgatttcaaacatttttggatttaggatcagacctactgctagagcatcatacatacttaatccagtcgcaaaacttcctccacgatattttgagaataattgatagaacatatcgccaattttcccaagctgtttgatcttttcagagatttcaggcattacttttgcttgtcttccgacttccattggtgctacttggataggaagaccgctatcaaaaacaatttttgctgcttctgggtctgcagcaaaattgaactccgataatacaccgtaatttcctcttcctaaactaccgcccattactacgatttgttctattctctcaagatcttgcggatatagatggataaatagggcaatatcagtcaatggaccaattccaattaaggtggtcttgttttcttcttgattaataattttatgcatagctgcaaccgcagttagagaatgatccgcaaaaactgttggttcgggaaaagagtacccatccatacctgattttccgtgaacattactggcattaatggattttctcaaaagaggttgttggctacctaatacaacttgaggttcttttttatacaacgtaagcaatttttcggtattcgcttttgtgttttccaaactaacatttccaaaaattggacaaatcaactttacatccaattcttcactgaatagcgctaaagcaatggctactgcgtcatcaattcccggatctgtactgataattactggttttttattcatatcatgctctctttcttaatgtagtgaaacgtttccaaaaagaataatacaacatagtatcttttaagtcaacgttgtattaaaaagaatttgttttaaatttaaagagaacggtagctctctggaaatgagtaaaggaaaacacttttgattttcatgaataacaatatccgattgatgaaattaaagattgttgttaaataagcctttgggcggatggcaggcattgtgatttcatgtatagtgagaagtaggaacgaactatttatgaaaggaagaatgaccatgatacttgtatggggattaatgatcgttttagcgatagttattatttatctgattatcccaggtggtcctgcttggaagaagtatcttgcggatatcgcgtcttcttttcaacaggaaaacgatatttctttgcagccatcggtcattaccgaagaagctatcgctgagttgccacagctgctaaggaaatatttaaaaaagaatggctatattaatcaaccaatgatgcgcaatatgtatattcaatttgaaaatacgaagtttcgaatggaggcagggaaaaaaacgattccgatcgatttttgtcaggtgaactttgttgatcgaccagaccgctatgcttttttaacggcacgcatgtttggcttgccggttcatgtgagagacagtgttcaggatggcaagggatcaatgatcggcgtgctggcgaaacattttcaattgtttcattccactggtccagaaatggatcaaagccaattgattacggcactggctgatgcggtcttcatgccgagtttatttttacaggagtacataagctggagaacgattgattatcagacggttgaaggaacaatcagctggaatggcgttagcgctaaagggcgatttacctttgatgattcgggagatattgttcgttttgacacggatgagcgctatatggacgaaaacggcaagggaacctccttagttccttggtttgttctatacgaaaactatcagagcgatgaaaagtatcgccggccaggctgtgtcagtgtaaactggcagctatctcaaggtatagacaactattttgttagtgatcgcattaaagtacagtattcgattgaggcatcagagatttataaagaaagggcgtcaaaggttttgccaagcagaatctcttgattagattaagaggaaacaaataggagtgctccgatatttttcgcaaatatcagagcactcctatttttaattatataaagcagcaatctctttgattctgcgcttcatttcagcgcggatttgtggcggctcgaggcattcgcagttatttccaaaactaaaaaggatattatagtagtaatcattttcaacaaaagggaaatctacgatgtagtggctatcaccatcaggtttaaaattttcgaacgtgcaataatccagcaccatatccataaccgagcggtgaatgcgaattttgatcgtggtttgtaccgtatctaaataatctgcaaaatctagctgcggtttttgatactcccgtgggacaaagtgttcctctttcatttgcaacttggtcatacgattaactttgaatagacgaaaatcatttctagccaaacaatatccctgcacataccattgactattttttagaacaagctgataaggctcaatcgttctctcagagcttctgccatgttgatttgaataattaaaagcgagcagccggttttcctgtaatgcgactttgattgtttcgacgtagtgctgaatgctccgatttcctatccatggacttaaatcaacgttgaactgatcgatctttgattcaatatccttcactcgatcagcaggaataaaacttttgacctttgcaagagcgcttgctagttcttttccctgcaacatgttggagaatcccgaaaggcttgtcaaaatagtggagagatcggtagaggagaagacttttttatccattttgtaattttccataatctcaaagccgccgcctactccggatgttgaacggatgggaattcctgccatgttgagagtatcaatgtcgcggtagatcgttcgcggagaaacttcgaatttttccgccagctctttagcgctgattcgctttttatctagcaagagcatcgtaatgcttagtaatctatccaccttcaaagattttacctcttttcaaaattttcttattgttagtttagattgttgccatatagttgtcaacaattgccttgtatactaaagctatagaaagttattggaggcggaaatttatgagtacaatttatgtttatgtgatggatacgttagctgactgggaattaggatacgtgacagcagagctgaattcgggtcggtttttcaaagaaggagcaccaaaggtaacgttaaaaacagttagtcattctaaagaaccagtcacgacgatgggcggaatgaggatcgtacctgattgtgtgattgctgacatcgaggtagcagaagcaaatgtcttattattacctggttcaaatacatggaacgatcaaaaacatttcgcaattatcgagaaagccagcgagtttctttcaatcggtgctatggtgggagccatctgcggagcaacagctgcacttgcaaattttgggttattggatgagcgtcctcatacgagtaatggaccaggctttctggaaatggtcgctcctagttataaaggacaaagccactatctagatgagccttctgtggtaggggacaatctgattactgctagttcaactggcggattactgtgggcaagacaaataatcgagcatttagaagtctttgaagctactacactggatgcgtggtataactatttcaatactggtgagacggaacagttctttgctttgatgcaatcattgccagcaaatcaataaatcacttaacaagaaacagcccaaatctgactagatttgggctgcttcttgttaatgtcctttgtgcttctcgcgttttttggcttgcttttgttgaaaccgtttgtcagcatactcagctttttttcggcgcttttgcgatttattcgccgcttttgcctgctcacggatttcattcatcgcaatctgggctttggttgaaacaacgggctgccgcttttcgcgattgatcaaacgttgcatccgtttgggactgagtttcttttcagctgtttttttctgagtagcaacaacgcccgtttgcttcaatagatgtggcaaacgtttggtcacaaattcccacacatccgcatcctttggttcgggaccaaaaacatgccggattgcttggtaatggccattgtcttcaatttctactaagccgcaccaaaaactgccatcgaagtaaatcgtcaacttcatgatgacacctccctcttgaaatgatttcaagcaatggacaacccgggagggcaggttactgacattttcatgcggcggactaccaaccgccatgtgtttttatgcttaatttaagtgtactaggtttggagcgaaaagcaacaggtgtgataaataaacaatgcattaaatttccaaacgagtctgatcggaagaaaatggctaaaagcgttagtgtcgaacactgcaaaactaagcctttcctgagttctaattgttttttcgttgataaagcggaattttatgtaaatatctgaattttaaaaattaaaagtatagacatttaaatatatagtatatataatataattgagaaagatgctgagaagtattgatgcaggtaagatatgaatgatttttgggatcattgagaaaaggaatgtaaccgaaatcatttgaaattatcgagcatttcattgtttctagtaaactgaataatcgcgcaggtattattggcggattggcattagcaaggaaaataccaggaggagaataagcgatgcagattaaatttccaagtaatttttggtggggtgctgcaacatcaggtccccaatcagaggggcggttcaataaagagcacgccaacatgtttgattattggtatgatattgagccagaagctttttacgatcaaatagggccaaatgtggcgtcaaatttttacaatgatttcaagaaagacattcgtttaatgaaggagatcggtttgaattcggtacgtacatcgattcagtggacgcgactgattgatgattttgaaaccgctacgttgaatgaagataatgttcgattctataatgacgtcattgatgaacttatcaaaaacggcattaaaccagttatcaatttgcatcactttgatttgccggtggcgctttatcacaaatatggcgggtgggagtctaagcatgttgttgaattattcgctaagttcgccgaacagtgcttcaagctgtttggggatcgtgtcacggattggtttacgtttaacgagccaatggtggtggccgaaggagaatacctgcatcaattccattatccgaatcttgtggatgggaagaaggcggtgcaggtggcttataacattcaattggcttcagccaaggcgattgcttgctttaaaaaagtcaatccaaatccagcggggcgcattgggattattttgaatttaacccctgcttatcctgccagtcagaaggaatcagatttggcagcggccgaatttgctgatttatggttgaatcaattgtatatgaacgcttcaacattaggtgaatttccagcagccttgacagaaagattggcagctgatggtgtgctttgggagactagcagtgaggagcttcaactgattaaggacaacacaatcgattatttaggtgtgaatttttaccatccacatcgtgtaaaagcaccagaggtttcaccggatagcttggcggtagattggcttcctgaaaaatattttgaagagtatcaaatgccaggcagacggatgaacgtggacaagggatgggaaatttatccgaaagcggtctatgatattgccattaatattcgtgacaattacaataatatcgaatggtttgtgtcagaaaatgggatgggcgtttcccgggaggaacgttacctgaatgaacaaggaataatcgaggatgattatcgtattcagttcattcaagaacacctgtattggctgcacaagggaatggaagaaggctctaattgcttcggatatcatttatggacaccgatcgattgctggtcttggaaaaatgcgtaccgtaatcgctatggatttatctccacggatattcgcacacaaaagaaaaccatcaaaaaatcgggctattggataaaagaagttgctgccgcaaataaagtagaaatagcagatcaattaattgctaaattaaataaataggaggatcaagacagatgaaaacaattatgctagtttgttcagcaggaatgagtacgagtttgttagtgacgaagatggaggccgctgcgaaagaggagaattttgatgcggagatcttcgcggtttcgtcgacagaagccaataatactttggcagagaaaaatgtagacgttttattattaggaccacaagttcgtttcatgcaaaagcaatatgaggataagcttgctgataaaggtattccggtagcagtcattaatatggctgattatgggatgatgaatggtcaaaaggtcttgcaggaagccaaaagattgatgaatcaataaggaggctgtacgatggatcaacaaaatttagaagcgattatgggactgattattcattccggaaatgcgaaaagcgatgcgatggaagcgattcgagcggctaaacgttcgaattttgctgaatctgaagcgaaaatttcggcggcggaaaatgctttggtagaagctcatcacgcacaaacaggattgcttacgcaggaagcacaaggaaacaatatggaaatttcactcttagcggttcacagtcaagatcatttgatgacctcgattgcatttactgatttggctaaggaaatcgttgatctctacaaacgaattgattaaaacaggaagaggagctgtgacaaaagacttgtcatagctcctttttacgaataaacggtgttccagaagtagcttcttctacgcaagcttcgcatacagttactgctaagtttcactaagcagaactagcattcggaaataagccgaaatttcttaaaactgatcacttctgtcacaacttttttttcgtgtaaaagtatgaatctatataaagtaagtttcatactattcttaataattagtatagaccaagtcgaaggggctgggctataatgatagagacaacaaaaggaggtcatttcagtgaaaaaatatattcatatatcaaatgatctaaaaaataaaatcatcgatggcacctttaaagcgaatgagaagctgccttcagaaaaagagctggggcttgaatacgatgcaagtaagatgaccgttaagcaggcgctggatattctggtatcagaaggattaatcattaaaagacgaggttcgggaaccttcattaaagatttatcagacacagaattaaaacgaatctcaatcaccaatcagttccgcggaaaaacggcagagtatccgcaaaatgaagtaaccagtaaggtcctaaatttttcagtcgttcaaccagatgaaaagattcaagaaaagctgaatatttcagaagatgatttcgtttatttcattcatcgagtgcgctatgttgatggtgttccctatgctatcgaagtcacctacatgccgattaatctgatcatgaatctaaagcctacacatgttaagcactcgatttatgattatattgaaaatgggttggggttggttattcaaagcgctcatcgaatcatcaccgtcagaggggcaacaaaagaagaggccgaggaattacacatgcaggccaacgagcctgtgggtgtggcagaacaagttgggtatttatcgaacggggctgcttttgagtattctaccaccactcatcattatgatcactttaaagcagaaatggttttaacaaagtagaaaacagaatataaagcgttacaaaccggttatttcgcgtgtttgtagcgttttttttgctgatatttcgcttttttgaagctactgcggcggtaaaaatctttcaataatatggattccataaattgtgcaaatagtactgtctaccattctgattaatatatacttttgaatataaatatgtagacttatataggtaagcgtgatattatagggatgtaatcgattactaaaaaataagaggtgacgaagaatgaatggttttatggataaactaagtgaaaaaatcatgcctttagcaaactggttaggcgacaatcagtacttaatggttttgcgcgactcttttatgttggcgtttccattgacgatgtttggttccattattgtagttattaacaatttaccctttttcaatgatgatacaaaaggaatgctgtctaatttattaggaaatggacagaatgcgacaatgagtatcatgacggtttttgttacattcggtatcggctattatttatctcaatcctatgatgtggaaggtatttttggcggagcggtggccttttcaagcttcttgatcctgactcctttctttatgagtacggaatctggtgaaactgttagtggtgtgttgagtctcgacagacttggggcaaaagggatgtttttaggaatgatcgcggcttttgtagcggctgaaatttattgccgtgtaacaaaacgtggttggcagatcagaatgccggatggcgttccacctgcagtaacaaaatcctttgcggctatgattcctgcaattctgacattaacagtctttttagtaatcaatgctgtcatggtcggagcatttaatgccaatctgcatgatgtcatttatgatgtgattcaaaagccgttgactggattaggcagcagtctgccagcaacgcttgtatccattttcttcattcaatttctatggttctttggtctgcatggacagattattgtcaattcagtaatggacccgatttggaacaccttgatgttagacaacctagaagcttataaagcaggagagtcgttaccccatattgttacgaaaccatttatggaaacgttcactgttggtctgggtggatcgggaatgacgttagcagtggtgattatcttagcttttctaatgaagaaaaagcaatatacagatattgggcgcttggctttaggcccgggaatctttaatgtaaatgaaccggttatctttggtttaccgattgttttgaatgcgacgatcctcattccatgggtccttgctccaatcgttgtgactactttgaactatttagtgatggcagctggaatcgttcctgcgccaacaggtgtttctgttccgtggactgttccgattattgccagcggtgtcttagcgacgaactcttggttaggcggcttgctgcaggtgatcgacttcctgattgtgggaatgatctggttgccgttcctgcgagcattagataaacaaccggatatgatttaatcaatttttgaaaagtatgagccaagtgctcatgctttttttctgaaggagcagatgaagaatgaatctttttgttattgatattggaggctcgacaatcaagtatgccacctgggatggcgagcagttagacgcgaaaaaaagtttgcctacaccgaattcttggaaagcgatgaaggagcagttcattgcggagataaaaagctcaacacttgaattttcaggagtcgcgatcagttctcctggttcagttgatacacaagcgggaatcatttatggattgagtgcgattgagtatattcatcgttttgaaatcaaaaaagagctggagcagcttttcggcttgcccgtctcgattaaaaatgatgctaattgtgcggcactggccgaagtttggaagggccatgcagccgaggtagccaacagtgcttttcttatcattggttcaggcgtaggtggagctattgttttagatagaaaactatatgcaggaccgcatttatttggcggtgaatttggttatatgatcttaaatgaaaaacaccaaacattcagcgagttagtcagccctgttaatttggcaaaaaattattcgattgaaaaagcagatgggaagagctacgatgcggtccatgtatttgatgcagttcaagaggtattagctaaaaaatatgtcgatcagttttatgcgaacctagcgatcggagcttataatgtactggtcagtttggatgtcgatcggttattgattggtggtggcatttcaagaagaccaggtgttgtggaacgtcttcgaaatgaaattgatgcattgctggaaactaaaagagcgcaagatcagactgcagaaataatgagctgcaaatatttagcggatgctaatctcattggtgcggtgtatcaatttatgacagaatttagctgaaggttgaaaaagtaaaaggaaaaaaattattcgaggagaggttcgtttttcaaggtaacatttacaatagataagttcattcagatgggatggttggcaatcttttgtgactatcgaaatcactgattgtcaaaaaatgaacgatttttgatgggtcattgtttaaggcttttggtaaaatcgaacaaaagcagtttggagtggttggcatgatcgatttacactgtcatattcttccaggagtagatgatgggcctgaaaatcttgaggagagcatcgctatggcgcatgctgccgttaaacagggaatcacgcacattttgtgcacgccccatcataacaatggccgttacaccaatccggcgcctaaggtaatttcagcggttaagagtttgcagcgagaattgaatcaaagaaggattgaattgacgctttttgaaggccaagagattcgcttgactggaaatttactaaaagagattcaacagcagcagctactatttaccgatttagatgaccaatacctattaatcgagtttcctactattgaggttcctgcatatacagatgcacttttttttcagttaattgatcgaggctatactcctgtaattgtacatcctgagcgtaatgctgttttttccaaagatccgaaccggttattgccctatctggaaatgggggccttgacccaagtgaccgcgccaagtattgtcggtttctttggtccaaaggttcaaaaggcagccaagacaatgctgactaaacggttagcctttatggttgcctcggatgctcatagcatgcagcagcgtgggttttatttaaaggaggcctatcaagaaattgagaaaacttttggaatagatcgggtaaaagagatggagcaaatgactaaggatttactaaatggagatcctgtcgtgcgtccggattatcaaaaggtgaagcatttttctttttttaaatagcttaaaaggcttgtatctttcaaaaagatacaagccttttctgctgatttttgacggtgaatagctcgtttaattttgtatccagagtataaaaatcaagttttgtcggttttcttggaatgacgatatttggaatggtaggctgatctactaaaattgtttttcttgttgaaagtaacagatcaagggaatttcttttacgaagacagtcatgatgggtgtaaatttccattttaaatcttccgagatattcattcttgatcatctttatcagatgttgttcttctaaatttgttaaatccgttgctaaaaaaatttgtaaaggctcttctactttttgaataggagtaatcgtttcaaataataatggataaatggacaatagataatctgtttctctaaacaacggaaaatttgtctttttttgtaataaagcaatcaattcgcgtgcccgttcttttaaatgaggagaaatggtttcgttgttgtgcaaataagaatcctgcgaatagcaatcggaggactccttattttgaaataattggcaatacaaatgtgtgctatagaggcttttttcgaccgtttttagatcgtctttagaaataaagaatttttgctgatcaaaccaaagattcttgaaggcttcaacagactgaaacaattgtgtgttgcgttcatagtggaattcgatgaattcttttctaatgtatgtattgttaagtacctcatcaattgtaaaaacgtataaaaatagaaagcctatttcatcctgccgatggagttccttaggcaaaacatctctcaactcatcgaaaaaacgatcaaataattcatttttctcaatattttcccacagctccctcgttaagtgaacatgcttttccttcttagctcgttcaatacacaccgcaatcatgcaaaacagcttcttatactcaaaatccgatagacataaatgaaaaaagttaattacgtaatcgatgattttttcggtaactagcttggttgtacttccgtagtgccaactgcctctgctgtatgaagacaataacaaggagagacttagattacgaatatgaatttcatttccaatcaattccaacgaacgacgttcaatagaaattcctcttgggactaatttttttcggaatttattgatcatgcgccacaaggaggactcacttacataatactgatgcggaaactggatgattgaaggcatttttgaaaaaaagattttcataatcagctgatagttgatcgttcgttcaatcattcgaaaaatcaaatcctccaaggctggttcaaaatcataatataaaaaatagccttttttattgtgattttttaaagcgatttctttttttgaagcaaaggaatcaatgtcctcttcgataaatgtaaggtatttcaacatggtacgttgattgatttctaattgtgaggacaattcatcgatggatagccatgttttgctttcctttaataagcaaataatctctatctttatgaacgtttccttgtcaaatagatcagcgaattgatggtttagaaacatctttgtgtaggcaccttcttctaataatttataaaaaatagttaatcaatcagaaagaaatatcgtgattgccaaataaatagacttttgtaatgttaatatttcgttttattaattcataattattattttatactctcgttcaaaaatctaccaaccaaaatttgaattaaaattaacaaaaaaagacgtttcgataaatgtgccttagattaatattagttatatttaatttttatgctaaaacattatttaaattttaatagaggagtgatttgttgagtgattgcatgaagattcattttttttgttactaatcttgatttttcctttagtggatattttcaatggagtcttcatatcttatggaaatccgatgcctttagggaccgcctatcgaatctttttcatcgcatacattttctacggtgtattaacaaaaggaataaagcaaacagatgattatgtattgcttctgataactcttttttcattaacgatcatctgtatcattcaggccttctttttcaatacaggcttcactttgttggtagaagaactgtcatacgttattcggttttatttatgcttgctgattcctatttttgctaagcagtttagaaattatttatctgtaaacaagttagctagattaacaattcttttggatgtttttttgattggcggattactgattccttacgtacttggattaggaaatagtacctacgatgatgcagcaggctttaaaggcttctacttcgctacgaatgacattgcttatgcttttttaatcatgcttttttttgttggctggtttcttattcaacagaagcggcgaatcattccggcaggcttcttaataggactttattttcttaatatgtactgtctattaattttaggaacaaaatctggattgatgacaggcgtgctctattcgctttttttgattgggcattttttatttcgtcatcgcagtcagtcgttgtatgagcaatttattatttttgaatttttacttgctttgctcttctttcttgtgatgaagggaaaggaatttctactaaattccttgtctagtgtaattgcacgctttacttatttccgcacgctttatcaagacgattggccgaggctgctgctgagctccagaaacgtctatttgaaggatgccgtcgcgaatttttctaaattacctaagaatcaatatgttttctggtttggttctggttttgagaatcggtggaattggtatggccgaaagggcggattaattgaaatggattttttcgatatgtttttttcttatgggattgtcggaacgatcgtcttgatagctgtgatggcttattttctgagggtagcggcttatcaaggatttaataaattttgtattttcttacttatatttacgattgtatacagtttcttggttggacacgtccttttttcagcattgtcagcgacggtgtttggatttacttgcatgttcatccaagtaattaaagaggagcagctatgaaaagaatcattatggtgggaccgaagagtactggaaagggtggaatttcaacagtaatcaaaaactttattgattattttcccaataatcagaaatatcagattcgttattttttttcatggaatgaaaagggcaagcttttctatgcttttcgcgccttttgccaactctttaaggctactcatactcgtgaagtagcgattgttcatttccatgtgtctcaagatgcaagcttttatcgaaaagctttattaataaaagcaataaaaaaaggaacaaaaatcatttttcatatgcatgcaccaaattttgaagcgttctataacgacgcggctaaatttgagcaacgttacatttgtaaggtactagatcgtgtcaatcttatagtcgccttaggtgatgactggaaggaatactaccagacgctgacgaaaacgaaagtaatcgtcgtaaataacgctgtttttgttcctcaggaaaatagctatcaagctagttccacaaatgtacttacctttggacggatctgtgaacgaaaagggagccaggacattttgttacttgctaagcgaattcaaaggaaaatgccagagctccgatttcatctgtacggggacacggatgacacaacttcgaagatttttgatcgaatgaagcggctgaactgtgaaaatgtcgaattagacggttggacaacgaatcaggaggaactgttgaaggattgcggcttacatcttttgccgtcttatcatgaaggcattccgatggcgattttagaaacaatgggatgcggtattcccaatatggccacaaatgttggaggaatcggccaggtgataaaccatcaagagaatggttttcttgtgacgcctggcgacatcgatcaaatggagcaagcaattatcagctttttctctaatttggaaaagcgtaaacgattttctatcaatgcgaaacagacgattcatcaacactattccttggaggcctatctttcgacttggatatgtgtatatgactcactagctgattaagggaaggagctattcatgtattcattcaacgatttcatacatgttctctggtcgcgaaaaaaaatgatcgtgattctgacactgtgttttatgggaataggctgtgcaggcttcgtatttatgaagggatttcagtacacgaatcaggtgtcctttctgttacccgcgacagagaccgctaaagaagatgaaggcgaggatgagctggaggtggaaaatcaagtgatttccagcaatatcaagctgattgagacatacaaagaaatgataaaaagtgattctcttttacaagcaattcaggaggactatccacagcaaagtaaacaacaattgttagatagtttgacggtctctaacagcatcaattcacaaatttttacggtctctatcacgacaaaaagcccagaacagagtaatgaaattgccatgagcttaagtgaaaaatttccacaaatagtaaaacagagcagtttgcctcgagacgtgtttttactttcagcagaaacggccgaaacagtgagaacacctggcttttccaagctgctgataggcgcctggtttgcgagcttcatgcttagcacctcgtgcagctttgcttggacttatttatatgaaagaaaatacctgagatctccggaagcggctcagcttctgattgagacagagaatattggcatagttgatttctatgaattataaaatttgaaagtagaggaatatgagtgaaagcaacgttagttagttttattgacagctcaaatattggtgatcgtctgattgcggaaaccttatcggagcagctgttaacaggaattgagataaaaaaatacagctacaaattaatcgaagaatcgcaagtgaagataaataaaaatctggttcgacggtctaaacctcatgatatctattacaaatattttcgtcagcttccattaataaaaaatgttgtcagtaaaggaaagtgggtacggtcccgaagaagaatgtatgactcggaagatattcaacgctttgaagcagcgttgcagcaatcagatttcttaatgattggaggaggcaatgcgatttttgatctgtctccagcaacgttatccgcgcaacgctttgatcaagtagtttccttggcgaagcagcatcagttgcctatttttgtcagttccattgggatcggtccattttctacaaagaaacagcagaatgcggcgattgctacattaaaaaaatgtgattttgtcagctttcgtgataaacgttccttggaatacttaaaaaatgcagggcatccggcagcctatgcgtcggttgatccggtctttcttttgccggaagtagagactttcgaacaattaaaagcacaaaaaaagcttcagcaacgaatcggtatttgtgtgattgattatcgaattaccggctgttcacgaaaagactatctcaactatttaaaagacatgaagaatctgatccatgacttagctgctgctaaaaaagagatcatgctcttttcttctgaggtgcaggattatgaaacgattgaaacgctctatgtcgagtttcttaaagatcctcaggtgaatgtggtctttgtaaaagagaaggaggacttattagcgctttaccagtcgttgaacttggtcattggaactaggatgcattcgatgatcgtggccgtctctcaatttgtaccgatcatcggtttgtcttggcagcaaaaggttgttgaaatgttcaaaaatctaggaatcgaagaagatgtattggcgattgctgacttgagcaaaaaaagagaaatactgtcgaaaaagatcgatgaaaaactggaaaataccgatcaggagctaatagagatgaggcgtcacaaagaagaaatgcggcgagcgtttgcgatcaattacgagattattgatactcttcagcaacatttggtagatgtatgaatcaatataaaaaattattcaacgattccattgttttcgctattggtagttttggcagcaagctcattacctttttcttggtgggattttacacctattatttgagcaaaagcgagtacggaacagccgatttactgatcaactcagtcaatcttttgctcccagttgttagcttgagtgtttccgaaggcgttttacgttttgttttagatagtaaagatactttggaaaaggtcagctggttgcgtacagctatcagaattaattttttgggactgatagtgacaggtatttgtgcgtttcttttctatcttttcggcccacagctggaaatttcttcctcaatgggtgtgtttagtttccttttactgacgattcagtccattcaacttatttttatgcagtacataaaagcgattggaaagctaaagatttatgcctcgaacggtattttactttcgttattaacgttggttttaggcaccgctttctttcgccgtttacccaataagctggatgcctattttttgtcacttgtattggctaatgggatttcattagtgtttttgtttctcaatatttcttggaaagacttattcaaaagcaggaagagctggaatccgcaacaaggaaagcagctaattacctatagcttgccgttgattcctaattccgcgatgtggtggattctgacaacctctagtcgttttattatgaccttctttttaggggtagcaagtaatgggatgtatgcagctgcaagtaagattcccagtctgttatcggtgattggttcaatatttctgcaggcttggcagttgacggctgttgaaaattatcgccaaaaggatgcaggggtcttttatcaaaaagtcttcaatcattattgtacgctgctgctggttttttccagtttgattttattatttttagatccattagcctctttgttgttatcaaaggaattctattttgctaaagcctacattccattattgctagtaagtaattttttctcctgtatttctggttttctaggcacaacctatatcgtggtgaagagaacaaaaggtgtcttaacgacttctttagcaggagcagcagtcagttttgttggaagtattctgcttataccgctgataggaatcaacggggcttcgatcgcttccggactgggttttttcatcatcttttatttacgaaaaaaggaaacgaatcggttgatggcaagtacgttagcaacaagacaaatgctgcttcagtttgggctgttggttttacaaatatttcttaatgaggggtggcttttttctaaaacactcggctttatcagtcaaatgttaatgatcgcaggcattattttcattgatttatttcaaaacaatctaataagaaggagggggcgcaatgaataaaattgaactgtttgatctgttgattgatgagggaaacttgaaggaaacggtggatgaaatgctcgcacgcattcagcgcgatgaagtaatcgagcatgtaggcgtcaattccaacaaggtggtcttgagtcatcgaaatgctcaaataaagaaaatcattcaacaagctgatatggtaagcgcggacggctactcggttgttcgagcctgtcgttggctaaaaaagaaaaatatcgagcgtgttaccgggattgatacaatgctggagcttctcaaacaggctgaagaaaggggtctgaccgtttatttcctaggtacgaaggaagtaatccttaaccgactactagaagtactaaatcagcagtatccaaaattacagattgttggcgcgcaacacggctatttcaaggatgagcagacggttgttaacaagattgctgcctgtcaaccgcaaatgttgttcatcggtatgacttccccttataaggaagagttcgtcagtaaatacaagaatgaattgaatgccaatttgattatgggtgtcggcggaagctttgatgtgttagctggtgagatttcccgagcaccggtctggatgcagcgcaatgggctggaatggctgcatcgttttatgaaggaaccgcagcggctctataagcgttacatctttgagaatatctattttgtttacttattagtacaggagaaatttaaatgaagaagccgcgtgtcctggtgttaacttatggaaaattgccgatacctgcagtaaagggcggggcaatcgaaacactcttagattctttgattgaagaaaatgaacagcagcaacaagtagaactgattgtgctgtctggggctgatcccgctatttccgctttcaatcaaacccacaaacatacacaagtaatttccgtcaaaacaaaagagcgacctttatggtggctgcttcaaaaatgttggaacaaggggcagcaacttttcacgggaaaaagaaaaaatcttattctctatccagaattaatcaaagcagctaagcagtatctacaaaaaaatacagtggactgcgtgattgatctgaattgtcctgaatgcattcctgctatccgttccttttacttaggcaagcttgccgtttatttacacaatgattacttaaatccccaaacgtttaaaggaaaagagattcttcagaaattagatggtgtcttatcggtctgtgattttcttaatgatcaggtgcgtcaaatcaactatacgaaggactggccgtttctttatcgaataaacaatggaattgcgctaaaagaatatcaaccagcaacaaaagaagaaaaacagaacattcgcttaaaactgaactacagccaaactgattgtgtcattgtcttttcaggccgaataacggaaaccaagggtattcatcttttgtttgaagcattgagtcagcttgattcactggagaatgtaaaggttttggtattaggcggcactacatacagctccgctgaaaaggacggctatttcaaaaaagtgctggcacaagcggaacacttgccgattgaagtgacattcacaggatatattgaaaaacagcagattcctaattacttgaaggcggcagatatttgtgccgtcccatccatatttcatgagacctgttgtctttcggcagttgaagctcaggcaatgggaatccctgtgattgcgactagaatcggcgggattcctgaatatatcagcgaagaaagtgcgtttctgatcgattatgacgcacaatttgtagaaaattttgcgactggactagatcacttgaaccatgatcagacccttcgacagcaaatgagggaagaagcgctaaaggagaggatgaggcactcacaggaacgctattatgatgaatttgtaaactgtatcaaccatttcgttgatgaatgaatggagaaaaggagactgaaaatgaaactattaattttaacaaaaaatattttggctgaaaccagttttcaaagcaagctgcagcaaatgaataacgaagtattttgcagtacgtgcttattagatgcctgctattcgatggatcaaaagatgagttatctgctgtcctgctttgatgcggtcatattaagcgaaacaatttcttatcaggagattgttgatttactctctaatattcgtgagcatgttcctgctatcgttagaaaatatgaaagcgaatttagcaaaagctttgaagaagagcagaccgattatgtcattgatcagcggataaaaggggatgcatcgttagaagaaattcgcgagctttgtcagacgatgagcccaaaaagtacagaaatacggaaggaaagcagctatatctatagcaaaaagaaaacacctgaaattaattatcatttttataatttcggcttttctaaacgggagagccggatgctgatgtgtctatacgaaaatagagggcagtatctttcacgccaagaaatgtgccaaaaaatttggaacgaagagcatgcttcggattcgaaaatgtccgcattgtctagctgtgttcgtaatatcaaagaaaaagtcgaaaaaagcggtatagatttcaatccgatcgataccgcatggggaagagggtatcagatgtcagatgagttctatcatctgatacaaacagaagcaaaactcaaaaagagtgatgctcaccaaattcttaacgtgcctgagaatatttttctttaaaagtagcaaaaaaattcagaaaacagacaaaaatagaaggaaactgagcgtttttaatcttttttcattaaaaataatgtgaatttatggtaaaaaactaaaaaaaccgtcacatgtttgatggttcaaggcgtctcttctgttctattattagtttgttagttgtaattattctaaaaaaaacagatgaaataatgaagaaaaatatatcggattttttcgatttttggaagtgaaatgatgaataatgtctatggaaataactcatccatcaatactgtcgaaatagcagagcataacaatttagcacccgctagttttcttgcaggaagaaccaaacgattgattgatttaatcgtgagtgcagcaggattgctggtccttgcgattccctttgcttttgtagccttgcttataaaattagaagatcctaaaggtccggttttttttagtcagacccgcgtcggtttaaatggagactattttcttttgtacaagtttcgaacgatgcatgtcggagctgaggatgaactagcagatttaataaagaaaaatgagatcaaaggtgcgatgttcaaaatgaaatgtgatccacgtgtgacgaaggtgggtcaatttttgcggaaatttagtattgatgaattcccacagctcgtcaatgtcttaaaaggggagatgtccattgtaggaccgaggcccgcgctgccgcgagaagtggaacaatattcagattatcatcgtcttagattacaggtgaagcctggatgtacaggtctttggcaggtgagtgggcgcaaccggctccattttgaagaaatgattcagttagatctgagctatttaacaaaaggcagttttcttttagatgtacaaattatgttaaaaactttgctggtaatcattacccgtgacggggcttattagcttaacacattaattatcggaggcaacaaaccactatggatgagaatttaaatttttctttttttgcacgaacaataaaagaaaagctaccaactattatgctttttagtctcgtcggattactactgggcggctatatttcttttttttggatcacaccgcaatacagttcgcagacgcaaatgattgctgcggcgaaaacaaatgaagaaaacctttcgaatgaaatcacggccaatctccaattggtaaaaacctacaaggaattggtattaagtgatttagtcttaggtcaggtacaggagaagctgaagtctgaagagaatcagcagatgtcaatgagtgaattaagggaggccattacactagaacagcagcaggaatcgcttttttttttcgatccgagctgtaagtgatcgtccaagattatcggctcatttggcaaatatcacttcgcaaatctttcaagaggctttagcagaaagccaaatccctggagagatctcaattacttcggaggcgacagcaagccgttctccgatctcgcctaatcataaattaaatttagttctaagcttatttattggggggttggtcggctttctattcgttctgctgcgagcaagtgtggatcagacgatcaaatcggagcaagccgtttatgagatttttgaaaccaatgcattaggaaccattccttataccacaagtgtggatatgaaaatgtctgccaaggataaggaccttttgaaaagaaatttgtcggaggatacggtgcatatatccagaagacaacgaaaaagagtctaaatttaggagcgtcactacatgaaggaaagagaaacacgcttaatttcgattgagaatcgattttcacctattaccgaacagtatcgcaatgttcgaacgagtattcagtttgcttcctcctcaggtcagccgttaaagctgcttttggtcacctctacagaacaagaggaaggaaaaaccaccgttgcggcgaacttggcagttgttatggcggaagcaaataaaaaaatattactgattgacggagatttacgtcgcgcaacagcaggtaaatttttcactacctattcgaatcgagcagcaggtctaagcaccttgctaagtaatctacgtagtgagccaagtgaagccattcaaagtacgcaagttaagggcttggattttttaccagcgggtccgatcccgcctaatccatcagagctgttaaattctaatcgcttaaatgaaatttttcggcagctggaagaacagtatgactatatcattgttgattcaccaccattattagtagttacagatgctcagattttctcttcaaaagtcgatggcgtcattttagtagtccgggaaaatcgtacgaaacgaaataatttagtaaagtgcaaaaccttgcttaaacggtcaaacgcccgtttaatcgcctttgtttataacggagctaaatctgtgagtgctggaaactataaatattataaatattagggggtgatcgatggataagcggtgttttaaatcaatgataaaaaaaaagaaaggggtaaaattagtgaagaaaaagaaattattaacaattggggctagcagtttaatgttgctaaactcaggcttactaccggccacagctttggcagaagaaaaagctgcaggaactgaggaggtagcaccggagacaaaggggttaacaactgacagcttgtcggaggctcttcctgagtcgagcgctgaacctgtacaggaaacaaccgaatcaaaagaagtacctacctcagaagttccggctacagaaaaggaggatacttctaaagataacgaagaacaagaatcaaagacggcatcgatcaaaccgatggatttgggattgattgcttgggggaaaattggtttaaaaacatcaacggataaagaattagtgatcaacaaccaaaaaacagaaggtattttaaccgttgacctaaatattacacaagtagcaaacttagggattgcagacaaaacgtattatcaagtgaaattaccaaatgaatttaagccattgctagaagacccgcgctttattaactatttatctggtgaaatgaaggcttacaatcttggtattccaatcaaatcgtatacgtacaaatcaacagacatcaaggttgatccagataactgttcactgattattcaaaatccaagtattacaacagttattggtcttttcccacatgtttacacttcagtaagtattgatttaggcggatttgtaacggatacagaaattcgtgtgccaagttcgttagacggaaaatatcatttcaacaccgctttaacacaagataacaatgttattgactggacagtcggtggtggtaaagagtcaagcggttacttagagtatgcgaagcttgacccagcttatggaactgaaaaacctgtgttaacagctgaaaatcgcaaaattgttttaggtgacgactttacagggtcatttgccatgaagggtgtttccgcaattgacaaggaagacggcgatatcactaaaaacatcgttattacagataatcaggtgaaatcgaatgttcctggcgtctatcctgtaacctacaaaattgttgacagccacggtttgtcagctacgaaaacaatcgaagtaacagttgctcaaaacacactaccagtaattaatgctgaaaacaaagtaatcgaacagggcgagccttttaatccattagaaggaattactgctcacgatgaagaagatggcgatttgacatcaaaaatcaatattaaatcaaacaccgtcaatacaaatgtccctggtaaatacttcatcacttattcggtagaagatagtcataaaggtattactaccaaagatattgaagttgaagtgaaagcaacgaagcacagtattactccaagtgactatacagtcggaaatggattaatcacaggaacatatgaaggcaacgtttcatatttagagttttacgtggacggccatttagtatctactggcggaacatttaaggatggaaaattcgcttatgaagtaagcactggcttgattaagaaaaattctaaagtcgtgttaatggcttatgacaaagataaaaagaaattagatgaaaaagcagtaaaagtattgtctaattacagcggcacactttctgcttacgattatacagttggcgatgaatatattcgcggaacctatagtggtgacgtgaagaaagccaaagtaatcgttaacggaaaagttctttctttaggtggaaccttcaaggatggggagttcagctattgggttggtaaaaatgccattcaaaaaggcgatagtgtttttgttaatgggtatgatgtcgacggcgatgtgttaactcaaaataacaaagtaaacatcctagctgctccagaagctaaaggaacaattacaccaaataaatttaccgttggcgctgttgaaattaccggaacatacactggcgatgtgaaaaaagcgaaattgtatgtgaatgacaaattaatttcacaaggcggaacctttaaaaacggaagcttcacttattatgtgggccaaaatgttatttcaaaaggttcaaatgtccgtttagttgctcttacttcagacgataaagagctggacactaaaaatgtacaagtagaatcaaacacatctggcacaatggtagcggacagctatacagtcggcgatgaatacatcactggtagttacagtggcgatgtgaagaaagcgaaagtaattgtcaatggaacggttcattctttaggtggaaccttcagtaatggccgctttacttattgggtaggaccgtcaagaattaaagctggcgacaatgtcttgattaacggatacgaccaaaacaatgcggtattgactcaaaataatcgtgtaactgtgaaacaaacacccgctcaagcaggaacgattacacctagtcaatacacagtaggcaacggagaaattaccggaacctatactggtgatgtgcggaaagctcgtttatcagtcaacggaaatgttatttcatggggcggaaccttcaaaaatggtcaattcacttattatgttggcagcagcattaaagaaggcgatgttgtcacaatgaatgcctatggcgcaaacgatgtattgcttcaggaaaatgtgaaggtcaactttaccagctcttcatacaagggcagcatttctccaaatgcatatacagttggtgcagttgaaattacgggtatttatgtgggcgatgtgaagcaagctcgtctttatgtaaatggtggtttgatttcaattggcggaaccttcaaaaatggaaccttcaactattatgtaggcaacgcaattaaaaagggcgacactgcgtacctagtagcttatggtccagatggtaaggaattagatagaaaaacagttcaagttaactaacgaacggagattttgaatgaaaaaaatattattaagtattgttgcagtttgttttttcttaacgggatgtgatacgtcgagtaataaagaaactgacggcagtaaggatatttctgctaaagtatccgaagttaccatgaaagacggattagacacaccttttacagcggatggggtcgaaatgaaaatcactgacgtatccaccagtgagtctgtcgatcaagcagataagccaaagcagctcgttacctttacagttgaatgcaaaaatatcggtactcaagacaaaggggtaggggcgattgattttcaattggtgacagataaaaaagataaaaagaataaaaaagataaaacatacaacgtaactgaggaaatggaagcttttggcggtgtcttagagcccgaaaaaacttcgaagggcaaattgttttatttgatcgaaccaggagaaaaaccaacaaaattggcctatgctccagctgacaaagcccttaaaacatggaatctacaataatagattttttcattgatcaatatttggcgagaacaatcaatctttttattatttagatcttcaattcgcttgttttatgtttaaaatctagagaatcttgaaggagctgatgacactctccttcaagattctttgttgtatgagacaaattattaaataaagggagatacatatgccgataaaagtaatgtcgatctttggtactcgaccggaggctataaagctggcgcctgtgattaagcatttggagaaggattcgcgctttcaatctagtgttgttgtctctggacagcatagagatatgttggatcaggtcttggacttctttcaaattatgccagattatgatttgaaaatcatgaaggaaaaacagagtttgagcgatgtgacggtgagaattattgaaggtttgacccctatcttggaggcggaagctccagacgtggtcttagttcacggagatactacaaccacattggcagcggcgttatccgcttattaccagcagattactataggtcatgtcgaggcgggactgcgaacttggaaaaagtattccccatttccagaagaaatcaatcgtcagctggtcgattcattatctgacctgtgttttgcgccaactgcagatagtgctgctaatttaatgaaggaaaattgttctaaggatcagatttttattacgggaaataccgccaccgatgcaatgagatacaccattcgtaaagactatactcatcccagtcttattgataatgacaggcgccgtttattagtcacgatgcatcgaagagaaaacctaggcagaccgatgacggaagtttttcaagcattggctcaattagcagaagagaaaaaagatatcgagattatttttcccatgcacaaaaatccggcagttcgtcagcttgctgaacatgagttgggtaaaattaaaaatattcagctgatcgagccattagatatttttgatttccataattttgcgcaacgcagtacattgattttaaccgattctggaggtgtacaagaagaggcgccttcacttggggtgcctgtgctggtgctgcgtgatacgacagaacgacctgaaggaataaaagcaggaacgttaaaactagtggggactaagaaagagactgtttatcaagaggtcaaaagattgctggaggatcaaggagcttatcaagcgatggctcaagcggcgaatccttacggcgatggtcaggcaagtaaacgtattgtgactatcctcgcacagacttttagtgataaagcgatgaaggctgaagaatctgaaaaagtaatggagcacaagaatgggaaataagcgaaaaagaaatgggccacatagagtactccgaatgaaaaaagtcctaacgattctagtgtctacgttactagtattgattctgttgctcactgcaattgcggcaaaagttctctacgatgtaaaagaaactactgaagaagcctatgagcctctggctagaacacaaaaattaaagaccgtagacttaaaacagcaggaacctttcagtgtattattactcggagtggataccggcagcttggggcgctcagaacaagggcgttctgatacgatcatggtggctacagtcaaccctgaaaaagaaaaaactgtattggtcagtttgccccgtgatacttacgctgaaatcgttggacataatacaatggataaaatcaatcatgcgtatgcgttcggaggtacagcgatgacgatcgctacggtagaaaaattactggatattccaattaattactatgtgtcgatcaatatgaaggggattgaatcccttgttgatgcagttggagatattgaggtttccaatccttttgcctttacctatgaagaaacagaatttccaaagggctctcagcgattagacggaagtaatgcgttaaaatatgttcgcatgcgctatgatgatcctgaaggagactatggtcgacaggcaagacaacgtcaagtcatcgctggaattatgaagcaagcactcagtatcaaagggatcagccgttatcaagaaatattaacgagtcttggcagtacgatcaaaacggatatctcttttagtgatctagagatagtagcgagaaaataccgcagcgcctttagcacgattgaatcagatcaggcaaaaggagaaggattcatgcaagatgaaatctcttatcagcgtctatctccagaagaattagccagagttcagcagttgttaaaagcagagctaactacgggaacataatacgaaatccctcctattaaacacttcgttttccaagtcaccgttgttttcagacattgaaaaatctccaacttaactgtagacaaaaaatatccatggatatataatgtctgtagaaagaggtgagtacttgaaattatcatcgtcctacgtccaagctattggaattttagttatgttagcagaattaccggaaaatgactcgctaaaatcgagtgaaatcagtaagcgaatgaatgtctcacatacgtacttacagaagatcgcgacgaaattgaagcacgcggatttaattgaatcttatgcgtctaagcagggcggatacaaattgaaaaagcctaaagaaaagatcaattttctcgatattttcttagctgttgaaggggaaacgccatttctttcccatatcaatctggagcccatcgatgcgatgttcattgaccaagatttagtcgccgaaaaagcagaggtcgtgaaggaaattcatagagatgctcagaaagcatatctgaaacaattagaggctcgcttattaacagagattttaccaaaagatgcggacggtcagtatttgatcattgattggaaaaaaataattaacgaagaataggagagagtagtatgtcatttaaagatgaaattaacaaattaaaagaaagctttgagcaaacgaaagaacaaggagccaaattaggcgaaaaatacagtgaagaaggaaaaagtatcggagaagagtacgcagaaaagggcaaggctgttggaaaacagtttaaggatatgtcctcttcagtcaaggagcgttttaaataacctgttataaaagagtataggtcacttatttttgagggagtaatcgattatgtgtactagtttaacgttgacaaatcaagcgcagcagcattttttagcaagaaccatggattttggctttcagctagaaggaagaccgtaagtgcctaatcaccaagtacctacacaccaaataacctaagccctataatggacttaagttatttggttgtttttgcgtactgtttaccacattctgcttgtgctagagggcgccaaggcaaaagttcatccaacgcttcattagaaacatgcgctagatttggaatacgatcaaatagaaattccaaataggctactggatttagctcatttgcttcggctgttcgatacacgcttaggataatccccgaagttcgtgcaccttccaaactacatgaatgcatggaatttttacggccgatcactagctctttaatttggcgctcggctaagttattactgagttccaatcgtccatcctcaaaaatccgctcaaatccttcacgcaatttcaacgcatacttgaccgctttatctagttttgatttcggaactgctgtaaaggagcccaaccattcatagaaattgatgaatagaggatttaaatagtcctggcgttttttcagccgatcttcagcggataagtcgacccactctcgttccaattggaaccaaacatcgatcatttttaccgcgatccaagcaggaatttcctcgtttttattgttctttggaagggcttcaaaaaacttccgacgagcatgagccaaacaataaacgagcgtgacatcttctaccgcgttataacctgcgtagccatcacaatgcagatacccgttgaagtctgctagaaattgcttcggcacttcgccagctcgcgattgggcgtgatgataatacacgattggctgtgtgctatgttttcctgtactgaatagccaataatgcgtgtctttcttgcccttctcaatgacccgatacgttgtttcatcggcgtgaaggatttcctcttgggttaaatggctctttaatcgttgggctaaactgtctaaggcgttatgacaaactttgatatgccagttggtgatgttatcacgtgaaatatccagacccagtgtttcttgccaatagctttcctgccgattggcaggtactttttgtccaaacttcaatcggatagtttcggcaatcacactgtttgatcctaaactattggagacgacaggtcgtggaacaagggcttttttataggaagaaatatctgccttttcgcattctttgcaacaatacgtatgttgtaaatgaacgagccgatccaacatggcttggtggaaaagcacttcttcgcgaattttggttgtgccaatgtctgtcatttgagtgccgcattggtcacagattcgttgctcctttgacaattcatggtgtctttcttttaagggaagatgggcgatcttcgctgctttttgaccgatttttcttttgtgtccttttactgttgtttcttgtccttcttctgttttagggacggccttactctcttcaacctcatcaggaaatagatttaactgaccagtcacttgtgaatccagtgtttctttggaacgaccaaaaaaacgatccgtaaagtagctcaatttttcattgagaagatgaacctcttggttcaatgcttgattcgcgcgctggagttctttgatcgtttctgtctgagattcaaggagttgaagcaggatagtcacatctacttcgacgttattgttagaagtagaatttgtgtgtaaggacaagaaattcaccaccattctgattattactactgttattattataccatttagacgcatcgaaaaacagagaaaaccgcataaaatcaatgattccgcggattttctctgttcaaaagaaaccttttgtcccggccttaattgctttgggttggtgaatgcttaacccctcaagtagccagtgaatctgttgcacagacagttggcgaacctcttccttttttctcggccattggagccggccgttttcgattcgtttatacccgagaaagaagccatcgttatgccagtagagtagtttaaatcggtcacatcgattgccgcaaaaaagaaaaatggcatcctcgtaaacattcaactcatagtcttgttggataatcctggcgagtccgtcaattcctttacgaagatcggtcttaccggttacgagaaagattttttctactttggtaaaatcgagaaacatcttatcccaactccttaagaatcgccgagaggatgtagctgtttacgccattatagatcaagacttcagaaccatctttctgacggatacgcagggcaatttttgcggtactgttctttttctgatcacgagccgttcttgcttgatcgtgaagttgaataggaacgatgtcatttgtgtttttcaaagaaccacctccgtttcacttgataacttaagtatagatggaggtggaaaggctttataggtaccgagttattaggcatttacggaagaccagtcgtgattcccagaaattatgtatggaaaaagcaatttaatggctcgcaacaaacaaaatacggctttcttgggacggggcgaaatctaggagagtattttctagcagatgggatcaatgaaaaggggcttgcagttgcagagctttactttttaaatgaagccaaatacagctctgaagaaaaagagtcgtctgtcaatttggctcctcatgaatttattatctggctactaggtgagatcgaaagcatttctgaattgcggaagcgaatcgccgaggtacagattgttgaaaaggaagtaccggttttaggttttgtaccaccgcttcattacatcgtaactgataaaaccggtgaaactgtggtgcttgaatcagatagcggcgaattggtaataaaagataatccagttggcgtcatgacaaatagcccagagtttggctggcatttgaaaaatttgaataattatttgagtattcaacccaacaacttttcaaataaaaaaatcaatgggtatgaaatcaagcctttcggtcaaggttccggcacgtacgggctgcctggcgggtatacttcaccagaacgatttgttcgaaccgtctacttgcgagcattaattgaatcaggagaaaccgtcgatgattctttgaatgcgatgtttaaaattttggacaacgttacgattccaaagggtgtgaacattaaaaacgatggctcgatcgactatacgcaataccgagctgtgtttgatgtatcgaacggcacttattacttcaatccgtacgaaacacaagagatttttgaactgacattgactgaagaactgttaacgaaagacggaccagttgaatttaaatatccaacagatttcaaaacgacaaaattaaattaatcgctaataagacaagctatttgaggtgaaatctttcaaacagcttgcttatttgtatgtagcagattggataaataggaaaaagcatcggaaagtatatataaaaaaattaggtcatatatgaaggaaagaatcatccgtttctttcgtagtaaagaaaaggagacctttgtgattctaataatgaccgtattttatttaaagttgaaattatatccgctgtcttttcattgggcgtttaattatttgccaaccatatcgtttgaggtaaataaacgatcattgaatagattattccatcggattatgaatagatcatcaaagaacgagctgagcgatatacaatcattttaactgactcgatgctataatttgattgaaataaatcaatatgaggagttttaatatgaaaaataaattatttttttgtattggttttattgtgagtatattttttcttacaattggaacgcacagtgtatcggtagacaccaatcgttttagttatgaaaccaatagttcaggaaataagatagcggatggtgttgctgacggcgatacgtataactatggataccaaaatacggccgaaatccctgtcgatagcgaagggtttattaattatcaagatcaagctgtaaagggccacgataaaatgtaggaaaaaggccatcgaaaatgtaggctgaattcaaatctgataatctttttcatgaaaacattcaaggagagtgaatcatgagaaaagatgtcttagaaggagtcctacgccacattatgaacgatattcaaccaaattacgcagctttggctaaacaatacaattgtgattacagaactgttaaacgctattacgaagctggtagaaaaggaaatatagaccagctaaaaaaaagaaagtcttcaagttctcctttactttctggatttgaagagattattagagataaattggagttgagctgttctgcttcttctatttattactttattaaaaaaatgggttacacaggtggttatactaccgtcaaacgatattgtcgtcactatcgtgacgaacgggtgaaaaaagcaacgattcggattgaaacaactcctggtctttcagctcaagttgactggaaggaaaacatcaagatggtgagtaaatatggcgaagtgttctactttaatattttcctatacgtcttgggttattcacgcatgaaatatttagaagtgacctttgatagaacgcagtccactgtgttccattgcttagtaaatgcgtttgagtactgtggaaacggtgttcctcaagaaatatggtttgataatatgaaaaccgtggttgatcgaggaaaaagtcaatttagtcaaactgtttttaacgagaaattccgacaatttgcgaaagatgcgcgattcaatcctattgcttgtcgcccatttagaccacaaactaaaggaaaggtagaagcattagctcgaacggtcaatcgattaatggttttcaattatgaatttgaaaacgaacaagatcttagaagaattgtaaatgagtttatggacgatttaaacaatgaacgttctcaagccgtaaatgccaaaccaatcaaattgctcaatgatgaaaaagctattctaattcctttaaatcgtttggaactcttacgttatgtttccagaaacctacatgtaaaaagaaaagtttccattgaatccatggttcaatatcaaaattcaaaatattctgttcccttgaaatatattggcaaagaagtgactctggatgtccggaaggacaaccttttcatctggtatgggcatcaatgtattcgttcgcatccattaagtgaaaaagcgttgaattatcaacgggatgattcgcttgaaattcttcggtctgacgtcttcaaatatttggaagatgaagaactagagcggtttgtagaggaaaatttagatgcttatgatgaattataaggaggaacttatgtcaaattaccatcagttattgaaccagttaacagatttaaatcttacgtgtgtcaaagaaaatttacctgcacatttagatgaggtagccaaaagtgataaatctcttgtcgattctttatttgaattgacgtctcaagaaattagttatcgaaaagctgaaacccaaagaaaaatcttgaaacgtgcaatgtttccttatcataaacgtctctatgattttaattttgatttccaaccaaaaattaaaaaaagtgaaatccaagatttagtaactttgcgcttcttagatacctatgacaatattcttttcatcggaaatagcggtgtagggaaaacgcacttagctgtttctattggtttagagtgtatagatagagggttaagttgcttatttatcaccagtacagagctcgtcaatcggctcattcgagcacataagcgtggaacaagtgatactatgcttaagaaatatgcaggatacgctgtattaattattgatgaagttggctacttaccattttcaaaagaaggatccaatttactatttcaattaatcaatatgcgttatgagaggaaatcgacaattattactacaaatattccgctttctcaatggtcggaaatatttggaaataagaaattaacaaatgctttattggaccgcttggtccatcactctaaaatcattcaaattacagggccttcttatagaatgaaaagctatagcgaagacaaagcgaaagaaaacaaataatacagaagaccgaatacctacattttcaatggcccaaaaccaacatttttttgtgacccttgacaagagatgcacgtgtatttaccaaccaacgatctattattcaaaaaattactaacttcggaggattcccagcatattctaaaagcattcgtcaaagatttattaggcttagaattcgagagactgatgccaaagcagacctatcacattgacagctacaagaaatcctatgaggaacgggaaaagatggaggtaaagcttaccgaggttgacatcctggcagtcgctgaagatggaagctataccacgattgagtgtcaagttcaggcgcaaaagtattttcacgaaagaagcctcttttatctcggggaagcctatcgctcgccctttggaaacctcgctaaaaacgaagtgaagaaaagcaatttttcaagcctgcgtccagcgtatggtatcaatattatcgatttttatttgttcgatgacacagaaaatgccctgcaattgttccgtttaatgaatctcgaaaccaatcgcctttttctaaataaagaggggaaagagctgctggttctttgttttcttagtttgaaggacgacgtacttaatacgcaacatgcggcgtatcactggcactactatttcaagacaggagaagtgaagactgacgcccccgactatatcaaagaagcgaaaaagaagacagacttcttaacattggaagagctagctatgaattagtcaagtgaaaaaggaatttcttttatctttaagaaaacacaccaaatagacctccaaaaatcgaatgaaaaatttatttttcggagatatcttcgggaaaatgaacttcgtaaggtttgttttgtgtccaaacggcaaaaatgatattcacgagttttctggcaactgcaccaatggcggttccatgtgactttcctcgttttctcaatttttgataatacaaggaaagggcaggatctttaaatgcggcgacaaaagcagcttgccaaatggctcttctaagataaggagaaccacgcttagaaagtctgtttttggttcctgtaaaatctccagactgatgaacagaggcatccagtccagcaaaagcaaggagctgattggggcgttcaaaacgtttgatatccccgacttctgccatgaggacagcggcagtaatgtcaccaatccctgtaatggtcgtcaaatagttttcttgttttgaaacgatttcttgaatttctgcttcaatgatcttgatttgagaatcaagcaactgaatctgttccaacatgatttgaatctctaacttgaagacatcagaagcaattgaaatgccaaaagaatgtgccgcagcttctttcaatttcatcactttttcttctgagcgagcgattcctaaccgtttctcacttgcggtattgatggtttcaatgagacgttcggcatcaatctcaagaagatcttctggaataggagaatttagtaagacttgcgtggaagaacaaccaaacacatccgaaaaaatctgatcgtattcaggaaagacctgatctaaacaagcaagaatttttctttttaagtcagaacaccgatccactaaaccatagcggaatcgttccagctgtttcaatcggaaaatatcttctgcgggaagttcggttttatcgggcaagtccaatcgaatgacttgggcgatcaataaagcatcaatcgtatcagtttttgttttccgaatgtaaaaatcgcgtaatacatcggactgtattggattgaaaacagtggtatgaaagcctagcttatgcacgaaagtgtagatggacagccagtaatgaccagtggcttccattccgaccatggtgttttctggaagtaacgcgtgtttattgaagaaagcaagcagttgttcactgccaaatttggtattggagatacggatggtttttccgatcgattttccgtgttgatcaatcaatccaacttcatggtgttgcttaccaatatcaataccgagaaaaaacattcaatcagatcctttcaaggatttgtcagatagcggttatcctctctgctcttggacgatatagcctcgttagatattcagaaaccaggttctatctagctcattcatatactgtcgcaagagaagaggcgtcagtctttttgaggaagacaaggcttcaaggaggaaaactacgacctctatctgcttactacaagtttaaaccaaaaagaaggtttaaaggaataaccagtcagaatgtatctgacaatattaatatacgaggaggaaaaagaaatgatcatgaaaatcgacaaagcccgagcaatagcagaggcagagttggagtacgctcgagatgaaggcatggcaaaaggtttggagataggaatagaaaaggggagacaagaagaacaaaaacgaaatctggaagaaaaacgagtgctgcttctaaacttaatgaaaagctctctctcattgaaggaaatctcagagataagcggcatagatattaagacgctgaaaaagtggaaggcagaatcgaagtagctgcgggaagatttcaaaatgagtgatactacgattaatatttttgagctcagtcatcaaaagtgatggctgagctctttatatagaaagaataatagaattccgatgtttttcagcaaaagctaagcgaagatttttataagtgattacgaagaatgaattagatacggtatactaaatttgaaagcgaatacaattattgcgggagttactcagatttttctttaattattttgaaaaatctcgatcgttacttcttagaattttaaactatattagagtagaaagaaggttgattcgtcatggaaaactattattcatcagaaacccgacagctattacaggaactcacgaataaacataaaggaatcaacatcattgttggcatgctaaaacaaggtgaggcggtttttgatgcttggaatgctgaaaataagtctattccgcataatttgtcctatgatattggctcaattactaagcttttcacgacttctttactagctaagtatgtttttgaaaataaaattgttttggatgcgccgttgaatcattatattttaggattgccagagcgtttttatcctacaatccagcaattggcaacacattcttcgggctatccaacagagattccctatacgaagttgcaaacggtgaaaatgatgctgacgatgaatcagcagggtggctttttgcatacaaattcttatcacggaactttggatagtacaaaaatgtttgaggtgctgcggacaacaccgatagaaccaaaaacgtataagtttgcttataatgattttgcatttggtgttcttggatatattcttgggcagcaaacgcaaaaaacagcgtatgaagcgatggatgacttcattgaaaaggatcttggtttgaaggaaacaaattcaagtagttctgctgaaatgtttggacatgaccgtaagcagcaaaagataaaaagctgggaatgggataaaacggatatcgtctcatcggcaggatcattagtctcaacggcaagcgatcttttaaagtttagtcaggcccatttaatgaatacaccaagctatctagacttgtgccacaataaatacacgaatgggaataagcaatgggatatggggctgggctggagaattgataaggacaatcagaatattcactggcatgatggaaacgcaggtggcttcagctgtattttaatacttgatcggaaaaatacattagccgttaccatcatgacgaattatggattagttaatttaaaggaattaggtatgaagcttttggctgattgtaaacagttatctgtaaagtagtgattatgaaaaagttgcttaaggagttacggaatgacttaggtatctgtgagacaatcagcatttacctcaatgaattagccctctatggaagagtacttttactcttctcagactgtagacaaagtccattttatggatgctgtctacagtcttttcttttataatagatttatgaaaacgaatgcaaggagtgatagttatgatgtctaaaaacaatacgaacggtagaaatcaatttgcgatgctcacgattgatgatttggttcctcaagatcatctcgttcgaaagattgatgccgcgcttgattttgaatttatttatccaatcgtcgaagccacttactccgttctaggtcgcccaagtatcgatccagtgattctgatcaaattggtgtttattcagtatttattcggtatccgttccatgcgacaaaccattaaggaagtcgataccaatgtcgcttaccgctggtttttaggctattccttcgaggagaaaatcccccatttctcaacttttggaaagaattatgtccgccgatttagagaaacgacggtgtttgaggatatttttgcctatattttagaacaagcagttaaagcaggttttgtaacagaggataatttgtatcttgattctacccacatcaaagctaacgccaataaacataagtttacgaaagaaatgacccatgatgaagcgaaagcctatcaggatgaattagaagatgagatcaatcgtcaacgaatagaggccggaaaacgcccttttactttggacttagaaaaggaagtgaagctgaaagaaagaaaaataagtaaggctgatccggaaagcggctactacgtcaaaggcgaacgagaaaaacaatttgcttattctgcccatacttcatgcgacgacaacggatttattcttagcacaatcatcactcctggaaatattcatgacagtcaagtcgcctttcagctcgtcaaacaatcgaagagactttttcctgaaatcaactgtgttgtcgctgatgctgggtacaagacacctaagtttgttcactttttgactcatttgaatcttcgaccttgtttgccttattcaaggcccaaagggaaaaaagggctattatcaaaaaacgagtttctctatgacgagtattatgattgttacatttgtccgcaagatcaaatgctcgctttttcaacggttactcgagaagggtaccgagaatacaaatccaatccaaaagaatgtgtgaactgtcctctgctaaaccaatgtaccaaaagtaaaaatcatcaacgagtcatcacgagacatgtttggggagatctgatggatgaagtggaacatcttcgcctaacggatctgaataaatcaatttacaaaaaacggaaacaaacgattgaacgaatatttgcggatgcaaaagaaaagcatgggatgcgttggaccaagtatcgaggcttggaaaaagtcgcgacgcatacgatgctagtgtttgctgcaatgaatttaaagaaattagccacctggctatggaaaggcaaggagcctttatttttttgttcaaaaattcgaaacgaagtagataaaagctgttccaagctcgagttacgagtttggaacagcttttgtctacagtctgggaagagtacttttactcttctttttttataaataatatgaattttttggacagacaggttgaaatgagaagtgtttatttgatttttctgtttttcaaatagaaaaaacaatatgtaaaaaggatttattcaaaattaatttgttcttaatagtgttagctgttacacttttattatagaataaacgattaatgaaagattatatgttgttggtatcgctatttaaggaggttagaaaatgaaaaagttagcggatcatccttcttttgacaaacggaaacagcatgttgttttgaagaagttcaatagacaagtcattagtgtcttaggagtgatcgggctagtaatcgggaattatgcactgcttcctatccaagctgttgcaactgagaccgccacaatcacgaaacaacaccaagcacaagaaactctgccgaccatcgcaacggatgcatctatttccctaccgccgtcacctgccgctcctgagaccacagaaagtcaaaagtccaccgaccaagcaaccgaccaaacagctactacctatagtaaagcccctgatgaaaagcaaacggaagactcccctttaccagaaaagaatgaacaagagagcactcaattgaatcgccaagagcaggaagaagcacagattgcacctcaaaataattccgaatggacgtttgaactcaaaaatggtcaggcagtaatcaccgattatcttgggaacccaaagaatattactatcccggcagaaattcaaggaaatcccgttgaaattaatctggaggcggtgttagggccagatttaaaaaatacaaccgaaagtttcatcatcgagacgtcagaagaggctgataaggcagtaagattgacggggcattttatgaacttttcaaaagtgacacgggctcaccaattcggtctgccatctttggcaatgcggacacctcaaaaataacggatgtttccaatgtgtttgaaaattgtaaaaatttagaaactgtagatatctctaagtgggatacatcaaatatcgaatactttaaccgaatgttttcaggctgccacaagctgacggagataaatttagcaggctggaatacggataaattaaaatttttggcatatatgtttaatgaatgcttcaatttgaaaagggttgatttaaccggatttgatacttccaatgtcattagttttaatgctctatttgagtcttatacgagtttggaacaggttgatttcactggttttactacaaccagcctagaatacgtagataacatgttcaataattgtacgagtctgacaagtctagatctatcaatgtttgatacgtcaaaggtgatatcggcgactcgttttgtttacgggtgcagcagcttgaaaagtttagatttgtctagttgggttataagtgatgataaggtaagcatgtcagaaacattccacggtgccaacatgcttgagtcattgagggtaactaataaatttcgatttaatgaacttaagagtctaagaggaatctattcaggtacgtcagagaccaccaattattgggtgatggatgattatctagcagtttatgaggatacaccggcgttaatcgacgctcataacaacttacaggaaagcgctgtccacacgtattcgattaaaggaaagcatgaggttctctttgatacacaagggggagatgaggtcccgccgattcaaatgatttttgacggaaagctggcgaccgatcctcaatacaaggggaaaagaacgggctatcgttttatgggctggacgttaaacgatcagccgtttactttcaacgcttctccaatcaacggtccgctaagattgaaggcgagctggcaagctcatcgctattcagtgaagtaccatagcaccggcggtactggttctatgaatgaccaggcgtttgattttgatgaattgaaagcattacagccgaatacttttaccaaaacggggtatcactttaccggctggaatacaaaatctgatggtaagggtgtgagctataccgatcagcagaaggtatttagtttatcggcggaggatgctgcggtcatcgatctttatgcgcaatgggaagtggcggactatctggtgacctttgaaaatactggtgactcgcagattgctgatcaatcctatacgattgaaaagggcattgacagtttcgagacgcctactaagaagggctacgattttgtcggctggtatgagggaaatcaaaaaatagatcgcattccaattggtcagactggcaaacgaacacttaccgctcaatggagtcctaaaaaatacacaatcacctttgaagacgaagaattgccgccgcagccctatacgattgagtctaggttaacactgccactatcgtcgaaaaagagattaggttaccactttatcggttgggaagtcaaagaggttctttcgcaggcgttgaatccaacaataattactgaaatccagccagggaacactggagacttactattgaaggcaagctggcgagccaattcttatgtgattcaatacgatgccaacggtggagccggtacaatggctcaacaggtgctcgcttataatcaaacagccaaattaaccaagaataccttctctaaagaacaggaacagttcatcggctggaatactaaaaaggatggcagtggaacagcctattcaaatgagcaggagatcctcaacctgaccgctgaaaaggatggaacggtgacgttgtttgcacagtggaagtcgactacatcagcactcgaggatctgatcaatcaggaaaaagcaaaagatcgcgacaaggctcgctatactactgaaagctggaacaactatgaaaaggccttgaaggaagcagaggaggtcttagcgacaaccaacgatccggctaaacaccaagcggctttagcgaatctgcaaaaagccattgcaaacttagtattgagggcgccgcaaataggcaataactcgactattcaaacaacaaatacgaagcgctacacaacggtaaaacgttatcctttaacaggttttttaaataatccagactttctcgttataggaatcgcatcagttggtatagcgctcgtaggcttgaacggtcgccgcaataaaagataaagcgagaatagtgaatacactgaaatgcgtaatcagattaaatattctgataaatcatttaaataacagattttaactatatgtcagatagtttagaggcattctatatgaagaagtagtctagttgacggttcatatcaatcgattgaagagcgttaaaaaactaatgaacgtgaatagcatcctcaagggcatgtggcgagaaagggagatgctgctgcgacctttgtacagagttttaaatagttcttttgtagctcgatccttttaatgagggtagagctttttatttaggagaaatagtacaacctaacatattgactgttttctccaacgaatcatactcaaaaaagatcgagaaaggggttacaattctgatagaaatcaaaagtctaatggtgataagtcaagatgaaatttgagattatttttattgaatagactattttgaagcgcactgaactaaacccgactaaaatcaattttttgtcgggcgtttcaaggatttgcgtcaataacaaattgttatttatctatcacgctccttggtggcgtgtagagttgatggttacgtagtagcgtatccaccaaacgcgtaaattttcttgcggttaagacgagtgctcgtttgtgttggtgtttaggtacctctttatacttgctttgataaaaagctttatattcaggaagataattttttactgagttggcagcttcaactaagtaataacgaaaatatcgattcccttgcttggtcagaggtgtattttgagactgatagtttccagattgtttaactttccaacttaatccagcgtacttcgccaattttgtttgatcttcaaatcgttcgatttgaccaatttcagcgatcaaaccagcagcgtagacttttccaattcctggaatactggttaaacattgatattctggaatgactataactaattgttcaattgctttatccagctctttgatattcttttcaagagcccgcatttcacaaacaagaacgcccagaacaatatcaatagattcttgggctacagtgcctaagcgatagcttgatctgatggctcgttgaatagccttggcaattttctcgggttgtttgaaacgacctcttcctttttcttggattaagtcactgaaagcttccaaaggaagctcagccagttcatctaacgtgaagtcttctgtcattagagaaatcactgtagcactaaaaagactagtagattcgtctttcatttcacgaacaagtgtgttgcatttgtacgttagattttcaagaaagtgttgctttgtacgagttagttgcttaattaattgataacgagttcgggtcagacgctgtaacgccatgtatttttcttctttaataggagacgtggtaaaacgttgaatgcgtagaaagtcagcaattcttagcgcgtcattacgatctgttttgtcttcatcaaacatgcgtctaaattgtttaattcgaaaaggattttcgatagttacaagcgtattgagcttttttagttcctcgtcttcatgaaaaaacattgaaggatggaaactgtacatggacgttgattccatgccaattataatttgatcaaataggtaattctcattgaactcaagaatcatttctcgtgttaatgaagcaccttcaatgtcattggagactgagatttcagacaatgtagacaactgatcgtcgtcagttaggaaacagacatctaacttttcagaactaacgtcaataccgacaaataatttcatggaagaaggacctcctttcgatctaaattttggaaaatgcttcgatactgtgggatttcccagaagctcactgtgtaaccacaacctcgcctaatagaatacggtgataaaagagctagaagctgccttccaaactactatctgaaagtctagtccattatcgaaacagctaatgagttggtagtgataacagtggttcgggtaacagactttgcaaggtagacaaagctacaggagggcatagcaaattcccgttggatcctttccatgaatccattgtactctgagaaatcacacaataacgaaacaaattccgcaaggaatgtgttattcaataaatttttcgattcagaagcattttgattaaaaagtattagacaaaaactattttacgaggagggcataagctatgccaatcaatgttcatcagaatgggactcttttccatttaaccaatcaaaaaatcagctatctgattcaggttttgtcggacggttcattaggaaatttatattttgggaagaaggtaacagatcgagaagattttcagcatctgatcgaaaatgagtatcgtccgaatacttcttacgtgaataagggagaagtggatttttcccgtgagcatcttcggcaggagtatcctgtatatgggacgacggactatcgtcatccagcactttcggttttacaagaaaatggcagtcgaattacttccttgaagcttgctgattatcgaatttatccaggaaaacaatcgctcgacggactgccagcgacctatacggaggtagcggaagaagcgactacgattgaatttattttatgggatgatttgattcaactagaggttgtattaagctatacgctttttgaggaagcggctgcggtaagtcgatcggttcgagtaaagaataaaagcacccaaaagcttcatcttgagcaggtaatgagcttgtgtctggatttatctgattgtgagtatgaaatgttgcagttatctggcgcatggggacgtgagcgatttcctgaatttcggaaattagtttcggggattcaaagtgtagagagtgccagaggagcatcgagtcactatcaaaatccttttctggccttgaagcggttagattgtacggaacaggctggagaggtgttgggcttcagtttggtttattctggaaattttttggctcaggtagaggtggatacctatgacgtttcgcgcgtaacgatggggatcaatccttttcaatttgattggttgctcacggcaggtgaaacgtttcaagccccagaagtagttatggtttatagtgatgcaggattgaacgggatgagtcaaacgtatcataagctgtatcgtgaacgtcttgcacgtggtgagtggcgtgacaaggaacgaccggttttgattaataattgggaagcgacgggtatggattttacagaggacaaattgctcgcatttgccaaaacggcggctgaggatggcgtagagttgtttgttttggatgacggctggtttggtggacgtagacatgaacgggctggcttaggtgattgggttgcgaacttggagctactgccaaatggaattaccggtctggcaaaaaaaatcaatgaactaggtctcatgtttggtttatggtttgaaccggagatggtgaatgaggatagcgagcttttccgtaagcatcctgaatggattattagagtaccagatcgcagtgtttctcatggtcgtcatcaatatgtcttggattttggcagaccagaggtggtggattttatttaccagatggtggcgaaaattttgcgagaggcagagattcattatgtcaaatgggatatgaatcgttgtatcacggaaccctactctgctacactgccggcagaaaggcaaggggaagtatttcatcgctatatgttaggagtatatgatatttatgaacgtctgacatcagagtttccgcagattctgtttgaattttgtgcatcgggtggtggtcggtttgatccgggaatgctgtattattcaccgcagggctggactagcgacgatacagatgctgttgaacgtatgaaaattcaatacggaacgtccatggtatatcctttaagttcaatgggcgcccacgtttcagcagtaccaaatgaacaaacctttcgtgaggtaagtatcgaaacgcgaggcaatgtcgctttgtttggttcctttggctatgagctggatttgaataagctttcgaaggaagagcgtacatcggttcgtgaacagatagcatttgccaaagagtatcgaagggtgattcaagaggggacattttatcggctattaagtccgtttgaaggaaattattgtgcctggatgattgtctcaagggataaagaaacggtcatcatcggttattataaaattctaaatgaagtgaatgcaccatttaaacggttatacttgaagggcttagaggctgaaaaagtgtaccaaagagttgataatgagcaactttactatggagatgagctgatgaacatcggcttggtgacaagtgatacttcttgtggtcaagttattgacggacgtgcgacatcgtatgattttgactctcgaatcattgttttaaaaggaaaataagttaaatgagctgtgccaaatcatcggcgcagctctgtttttgtcttctattctacggtgaatgattctcccgttttgtcatagcgctgttgccgctcgaggtttttcttccgatattgcgtaggtgtcagctcatatttccgtttaaaagcctttgaaaaaactagcggatcgcgataaccgctgtattcggcgacggcttcaatggaaaaatcactgatgcttaatagttcagctgagcgagtcaagcgatattctgtcagatattgctgcaaggtcaaattcatttcctttttaaaaatcgccgataaatagctgcgattcagggatagtgcatgagcgaggctttgaatggaaatatcggcagcgtaatttgctttgatgtagtcgattgcactttgtacgtgtggattagacgcttggttggttgtggagatttgctcttttgactgctgcagcagtgctaaaaattcatacaataaagaagaaagcataagttcggaatagatcgaggtttgatccaagaggaagctcttttccaagatcgtaatgatttcctcctgatgcacgacatagaaaattggatgattctggtcaaatcccaaaccttccagataagatgctgccaaatcaccagtaaatgctgcccaataataattccaagggtcttcacgatcggcctgatagaaggtaagcttgtctggagggataataaatccttgtccggcggatacgtggtatttttggttgtcaatttggtaaatgcctttgccagaagtaacaatgtgaatgatgtagttggggcgaacggcgggaccgaagctgtgaagtgctccgcatgcggcctttcctgtaaataaaagctttaagtccttttgtgtatcaaaggtataggtttttacaaacgatttctccaaaatgatcacctaacattttcactgtttttgattacattatactatatagaatacgctttcacaaacgtataataaggtcataggtaagcgcataccgaacttgaaaggagttattaaaatgaaagttccgtttagagagaaatacgcatttggtgtaggagcattggggaaagacgcagtcatctgttttgttaatactttcctacttttttactacacagatgttttatatttatccccagcatttgttgggacattgttttttggtgcgagagtttgggatgccattaatgatccagtgatgggcatgattattgataatacacgctcaaaatttggaaaatttcggatatggttagtgatcgggacactattaaatgccattgtttttgttttactgtttacgaactttaatttatctggcggtgctctttatatttactgtgcggttacgtatgtcatttttggaatgacttatacgattatggatgttccttattggtcatggctgcccaatctgactagtgatccagaggaaagagagcgcgtatcggttcttccgcgaatatttgctagtttagcaggcttgctgacagggacctttgggcttcaagcggtgaatcttttaggcagcggcgatcaaatgaaaggatttcaattaattgctatttttatcgcaattgcttttattatctttattggaattacggtaaccaatgtaccagaagcctcaacgcttgatcagcaaaatgctccaaagttgacggtcaaaaaggcagttgatgttatcaaaagtaatgatcagctattagcatttattggtttacttttgacatttaacttatcaatgcagatcatgaacggattcatgatttactactttaaatatgtggctggaaatgaagcattattctcgctgttcttctttactatctttgcagaaatgtttggtttaatgctgtttccgaaaatcagccggaagattagtcgcgaaaagacctatatccttgcatgcttattaccagtgatcggcttagtgattttattgacggtaggctttgttgctccgaagagtgcggtatttacgatggcggctggactaattttgaaatttggttcaggtctttcactaggtgttacgaccgtctcgatcgctgattgtatcgactatggagaaataaaatttggtactagaaatgaaagtattatctgttctgctcaaaccttcctgatgaaatcctctcaagcagtggcgggactgctgacaggtgtcggtttatcacttgtcggttatgtgccaaatgtggttcagtctgccaccgcagttttgggtattcgtctactgacctgtgttgttccgattatctgtgtaatttttagttatgtgatttataagagatgttataagctgaagggacaacgtttaattgatctttcaaaaagcatcactaaatttcataaggaaacagaaaaaaaacaaaatctagttgaaggtatagtaaaagaagatgtcaacttcgaagtataatttattcattcgcgcaacgattacggttttaggcatttgctttatcagctttggaatcgcttggatgcgtttcagccagttcggaacagatcccttcgtaacgatgaacattggcatcagtcaatttctcggagttgaattcggttttatccaaatgctgtcgaatctagttttgttagctgtgatgttaaaggtcacaccaaagctgattcatttagggacttttttaggaatcgttgtagtcgggtacctctcggactttcttctgacgttcctttcatttcttcccgaaaattatgggtggagacttttcgccgtggcgatcggcttagttctttgctgtttcggtgtgggggtctacatgtcagcgggtttaggaatctctccctatgatgcattaggaatggtgttggaaagagagatgagagggaaatttaaatataaggaaattcggatagtcactgatttatgttgtgtggtgacgggttttactcttggcgcaccaattggactgggaacgcttctgacagctttttttacaggtccattgattgcttattttaaaaagggaatcgactcctttttgaatacaaaattactacaaaagccgttatcataaaaagagacgatcatcctatcattgatatgctccccctatataggacactgaaatataaagtggcttatatagggggagtttgtatgtctagaggaaaaatgaaattaagttcagaagaacggctagctcttgtagaaagagctttaagaaatgaagctagcataagcagcctggccaaagaagcacaagtcgatagcagtacgatagaaaggtggatcactctttatgagaatgaaggacccacaggtttactccctacaaaaaggaatcaatcatactcaacagaattgaaactgaatgcggtccatgattatttagctggaacatatggtagcttaagagctgtcgccaagaaatacgggcttcgtaacaaaaaacaattagaagactggttaaagatatataatactcatagaaacttcaaatcagaaagtggtggaagtagaatgagtaaatccagaaaaacaacattgaatgaacgagttaaaattgtgcatgactgtattatcaacggtcgagactatgggaaaactgcgattcagtaccacgtctcttaccaacaagttcggaactgggtgttgaaatacgatgagatgggggaaaaaggcttagaagatcgacgagggcaacgagcgggaagtaaacctgccagaacacccgaagaagaaatgcgcgataaactggctcaacaagaacgacggatcaagttgcttgaaatggaaaatgacctgttaaaaaaagtcagcgagttagaaaggaggcgggatttgaattagttcgtcatacgtttgaataccaatcgatcaaagagctgcacgagacaaaaggctatccaattaacaccatgtgtaccctgctccatgttacaagatcggcctattatcgttggttaaaaaatcccaaactgcctgaagtggtatttaatgaacagttggctgaccttgttcgttatatttatgaagcagacaacgataaaggatatcgcagaatctgtgaagatctcgtgaatgattatggctttcaagtgaatgacaagcgtattcttcgaatctgtcgcaaacttcaaatccaatcaaccatcaagcattcaggcaatagtatcactaaggcatccaagactccgtatcatattgcgaaaaatcatttgaatcgaaagttctatgcggatcaaccgaatcaaaaatggctaacagatgtgagtgaattcaagtattatgaaggggccgaagtgaagaaaatctatttgagcgctattcttgatctcgccgatcgtcgcattgtttcatttgtcatcagcgacaaaaatgacaataaattagtctttgataccttcgatcaagcagtcgccgccgaaccaaccgctcacccgctatttcatagcgatcgcggatttcaatatacaagtaaagttttttgcacaaagctaaagaaagcaaaaatgaagcagagtatgtctcgtgtcgcccattgtaccgataatggtccaatggaaggcttctggggaatgcttaaacgagaaaaatattatcggcgaaagtttatcagtagagaaagtctcgttgaaatgatcgaaaaatacatgaattattacaacaatggtcgctatcaacggtgtttgaagagtaagacaccgagccaagttcatcaagaattattaatggcagcttaatcactctccctcttggacaagcgaatagaataaatccgcttattcaagaaggagaccagtcgagcaaagttgaggttaaacaaagtaaaaaacataaaaactgcctaccgaaattcggtagacagtcgtcaaaataattttattctatttcattgtccacttgacggggagcccagcacattgaggatgatcgtctttttttgagaacaatgatagaaaaattagccctccactatgccaccacctgcttttttcctagtagactactctggtgacaagaaagtgggggatagtatggaaacaaacaaggcaaaagagcaaccgcagatttggcgtcgaaaaacggtattgttcatcatcagtcaggctatcacgctgtttggttcgtccattgttcagatggcgatcatttggcaggtggcactggagacttcatctggcttatgggtaacgctgctgaccttgagctcgacgattccacaaacggtgatttccttttttggcggggtgtgggcggatcgctatccgagaaaacggctaattatacttgcggatttaggtatcgctttggtgacgttgatgttagcagttattttgctagttggagaaacaaccaatatcctgccgctgttgctggtagtatccgctctgagatcatttggctctggcattcagtcgccagctgtgagtgcggtcattccgcaaatcgcaccagaagagcagttgctccgttataacggtatcaacggaagtatgatggctatcgtccaatttgcttctccagcggtagcaggagcaattctaacgattgggtcctttcattggattcttttgctggatgtagcaacagcaattattggcattaccattctttgctttatcaccatcgcgaatcaaaaacgtgagacacggatgcacgctacttcttttcttgtcgatatgaaagcaggtatctcctacgctgtgaaagaacaaaaggtaaaacggctgctgctgacctatggcgcatttatctttttgagtgtaccatctagttttttaacggtacttatgatcgagcgaacctttggggatagctatgtatatctgacagtcaatgagatggccggttttgcaggaatggtattgggaggtattttacttgggacttggggcggttttaaggataggatgcggacgtttatctatgggctactcggctttggcctgctctcattaatacttggatttacctatcaattttggctctttgccgcttgtatgtttttcatgagtttttttattccagtcgttcaatcttcaaccacgactatgcttcaagagcatgtgcctgaagataagcagggacgaatttttgggcttttaggtgccatgtatagtggttttatgccgcttggcaccgcaatctttggtccgcttgcggatgctgtaaaaattcagtggctggtgatcatttgcggtgtgttcatcgtaagcttaggtctgctgcagttagtgagaaaagattagctaatagttagtgattctaaaaacacttaatttgtctttagtgacagactaggtgtttttatgataatgattgagaaaaatcggcttctcattgatggtaagagaagttttggctcaacgtgatttactaacggtagataattgaataaacacattcgtttaatcagtcataaaaagagcagtctcgctacttgtgccgcctactatattaagctatcatcaaggataatccataagatagagctgttttggcattcttcaatagaacagcgatattccattactttgattttagaagtagagaattgttgattgtttccttgcttttatctaataggagtgtttgatagatgaataataaaatagattcatcgttgccgactaaatggcggagaaacttgtatttttttctagctggacagtttttatctggaataaccagtatgattgttcagtattctatcatttggtatttgaccaagataactggttctgcaacggttttaagctttgctacattgttggggatgataccgatggtcgtactgagtccgtttgttggaccagttgtggaccgacgcaataaaaaatttctgttaattattacggatattgttgtcgcgctctttgcgctgatcctttcgattacggggacgatttcccctgaatttccattatggctcgtttttgtatcgttgtttgttcgggcggtcgctcaaacgtttcaaatgccgatcattcagtcaattctgcctacgatggtgccggaagaggaactgactaaagtgaatgggcagctcgggatggttcaatcggccaactatattattgccccagcaatgggcgctttcctattctcgattattccgatgaactggctgattttgtttgacgtacttggtgctattcttggtgttgggctgctgctttttgtaacgattcctcatgttgtttccgaaggggaaagcattcatattttagcggattcaaagtttggcctgcagaagctgatagaaaataaaggtctgtggtacattacgcttatcggctcggtgttcatgctgatctttatgcctgcagctagtctatatcctttaatgacgatggactattttaagggaacggtggggcaagcaggattgatcgaagtgatttacgcgactgggatgttggctggcggcgcagtgattggcctgtttggtaaatggaaaaatcgcatgctgccgattcttttttcttatttggttattggggtaaccatcggattaagtggattattgccaggaacacaaaaaggatttatggtgttcgtcgctttaaatgccattgcaggcttcgcgacaccatatttcaatactttattaatggcgatgattcagcaaagctacgaacctaaatatttaggccgagtcttaggtgtcattaattcattgatgagtattacaggtcctgtgggcttgatttttgctggaccgatcgcagataatatcggagttgaaaaaatgtttatgattgcaggcattggcaccttggtttgcggcgtggtaaatgttttaattcctcaggcccggaattatgatatagagctgcagaaaaaaattgctgaacgaaaaagacaagaaaatttttctgaggagtctccttagtagagactttcaataagggttttatgaatagaaaaaacaaagtgaatcggctacactagactagacagaaaaaataaggtgtgtagaataataaaaaacacacgggaggatttttcatgtcaagacgtcaacgaagaacctattcaaaagaattcaaacaacaaatcgtcgatctctatctcgctggtaagcctcgcgcagaaattattcgagagtatgagcttacgccttcttctttcgataaatggatgaagcaagcacaatcaacgggctcattcaaagaaagagacaacttaacaccagaacaagcagaattgatcgcactaagaaagaaaaataagcaactcgaaatggagaatgatattttaaagcaagcggcgctgatattcggacgaaaagacaagtaattgatgccaacaagcataaatattccatatcagcgatgtgcaaaattctaaatatttctcgtcaaacctactattatcaagcgaaaccgatcgaaaatgagtccgacttagaagagatcgttcaggaagagtttattcgaaaccgaaaggcttacggtacccgaaaattgaagaagtgtttagcaaagcgtgggcttcaactcagtcggcgccgaatcggtcgaatcatgaaacgccgcggattgacatctacctatacgatcgctcattttaaagggcaacgaacagcttgtaatgaagcgaaaacagcgaatgtattagatcggacctttacacaagaacagccattggaagccatcgttacggatcttacttatgttcgcgtggggaaaaagtggcattatatctgcttaatacttgatttgtttaatcgagaaattattggttattcctgtggtgagaagaaagatgcctcattggtaaaagaagcctttggacggataccgtattctttaacagacgtcaagctttttcatacagaccggggaaaggaatttgataaccaaaccattcatgagattctgaatggttttggaattactcgttcattgagtaggaagggttgtccgtatgataatgccgttgcggaatcaacctataaatctgtcaaagtagaattcgtgcatcaataccaatttgagacactggcacagctacgtctagaattgtttgattatgtgcattggtggaactatctacgcttacatggcacgttggcgtatgaaacaccgatccaaattcgacaacagagattggcgaagcgaatccttgataatgagcgcggatctgatacctctggagagactaactatatagagtcaagtaaaaattagccaaatcaaaaaatattttataacagataattccgaaaaaagggtacaacaaataagcttcttaccattagtttttttgaatgttcaatagctaatcagaaacaattatataaggctcgtttttagtcaaaatagcatgaatcacgtaacaaagcttacgagaaaccgcacctaaggcagttagatgatgttttccttcggaaacttttttctggtaaaacgcactaaaaacaggatcacattgagaagctactaaagccgccgaaaacaaggcttttcgcaaatatggagaccctcgtttactcataacattatgcgttgcctcatattgccctgattgtgtcacggaagcgtctatcccagcgtaagcaacgagttttttcgggttagaaaatttttgaatatctccgatctcaccaagaatagtcgcaccgtttataggaccaattccaggaattgtgagaataacagaatttaaagtgtccattatgtgcttgatttctctttccgtttcctttatttggctttcaatgaattttaattgttcaatcattgaacgtagttggaaggtgaacgcttcttgagcaaattttactccaaaggagttagaagctgcttgcttcaattggtccgctttttctgccttgattcggttcctgcttaactcagctaagtattgggccaaagtttctgaggaaatgttttctaagtcgatcggggcactaaacgccagcaataactctttagaagcttttccgaaaacgccctgcttggtaaaaatcgtcgcgtattctggaaagacttgatccaatacggctataatttttcttttgaagtcgctcgctgtacctactaaataagttcggtaacgagaaagttgtttcaaagaaaaaacattttcatcggataagaccgtttcgacaaatgagccatagcgcattaagtcagcaatcaaaacagaatcaataatatcgttttttcgtttccgtatttctgtacctttacgccatccgtctgtttgaaggggattcacaacgtgaatcaaataatctgattcgtgaaggtatgaaaagatggacagccaatagtgccccgtggcttccatccctataacaaagtcactgggtgctccggaatagtcgaccattcgctcaattaatgactctgctccttcagtggtgttaggaaatgaaaaaccttttagtaatacctttccttcctcgttcatgatagaagcaacgtgagtgcgtttaccgatatcaatgcctaaaaagtacatgtatatctgacctttcaaaaaaagaattttggattgaaatccactcaactgaaaagcgtcactaccttgtacgagatacggagtaaagtaaggactttcaacatctaactcatacgcaatccacttatcagagagaggagccagtctctcgagtgcgggttcaatgacccaaggggggaacggcttagcctctcaatccaataaatatattatctcaaaagaaatgagttaataccaaattaaaataacgatggttcatagggttatccaatcaaaaccggaaggttaaaaccctaactctaatatacaaggtggcctatggaacagaaagaattgattcactccgtttatattaacggcactgcaacaatgcgctcgttctttgaggcattacttagaatgagttctggagctgaacagatcggagaataccttcaaaacaaatattcaccaaatgaaacgagtttatacaaactgttgaatcaaaaagatccggtcagtgttcaatttttgtcgcaaaaagttgatttgaataaattgaggtcctacttagatcaacataaggtatcgtttgcctttgaagaaaccgaaaaaggcgttcgaatgtattttaaagcgaaagatgaattgttgatcgcacaagctctaaaaccagttataacggatgtgtcgactaatttagagtcgttttcgaaaaaagtgttgaagcggccaggaacaatgagctttaaagaacgagtttcttatgcacaaaaacaccaggcaaaatatcagggaacaatcaaaaaagcgccgagcgttaaagcaccggttaaaagctgatgaaccttctgccgggaaaaaatcgatagaattgaggaatgaagatgctatttgttgttgaaacaattgaaggtagcgaaaagaaatacaacgtggtggaatccgattcacctaagagagcaatgctacaagatggatttgatttattgaattcggaatcagatccaaatacgaaaatagaaagttctattaccggcatatatgaggtaggtcaaaccaatcatttgttagaaatatctcgaaatgctgaagtgcatagattttatcgggagagaataaaaaatctaggttttgattctacaacattcaaaaaaatagagtgaaagaaggaacggtgaatggaaagaataaaaaaaattgtccgattagtggaagaattggactttgatagtaatatgaaaagagagtgtaatataaaccgtgtaagtaaccattaatcctaggcaggtggttgcttcgcggtttttctttttctacaataagatcaagaggtgagtacacgatggctagaaagaaaagaaatcctgatgccgaaaagttttagctgaatccattctgaatgcctatcaacctgaatctgtcgatgacatgcaagatgctttgaaagatgtgtttggtcccctttttgaaaagatgcttcaaggagaattgaataatcatttaggttatgatgcccattctaaagagcctaaggaacacgataaccgtcgaaatggctatggaaataaaacacttaaaaccagttttggtgaagtagctattgatgttcctagagaccgggaggcttccttcgaaccagagttaattcctaagcgaaaacgagatgtttccgacatcgaagggaaggttctttccatgtatgcacgaggaatgagtcaacgagatatcgccgcaaccgtcgaagacatttatggctttgatatttcccatgaaatgatttcagacatcactgacgctgttcttcctgaattggaagaatggcaagcccgtccattggccaagtgctatgcttttctattcgttgattgtatgtatgttactttaagagaaaattatgaagccaaagaatatgctgtatacaccattcttggctatgatctcaaaggaaataaggaaattttaggattatggttaaatcaaacagaatctaaaaatcgctggatgcaagtgttcgatgaattgaaagcacgtggtgtcgaagatgtttttttcatttctatggatggggtttctggtcttgaagaaggcgcaaaagcgatctttccatcggtaattgttcagcgctgtattgttcatcttgttcgaaatgcattgcgctatattccaagtaaggattataaggaagtctgccgagatatgaaaaaattctacggtgcttcgtctctaaacgctgcacatgctgcttttgacagttttcaaaatcggtggtctcattattctggtgctgtagatgtctggaaacggaactttgcacatgttgaacaactatttgattatggtagtgccattcgaaaaattatgtacactaccaatgcggttgaaagtgttcactccagcttcagaaaagtcacaaaaaaaggagcgttctctaatgagaatgcactcctaaaactactttatttacgcacgaaagaattacacgcgaagtggtcaggtggtcgaattcaaaactgggctatggtgcttaatcagttaatgatcaacgagaccttctcctctagaattgaaaagtatgcgatttaccttccgtaacaacggtaggtttattcaactacgtgtccgatcaaaatttatctgatttcaaaatagccaagagaattatggttgttaaaaactcttaactatttaacttccacagtttagttgacaaaccctatgaaaattattttatcattggctctaacattaatctggctcttacacctgactgctttttctagattgtggcacacgttagtatcacaggttataactcaggagtttttagtgacggtaactcttcctattttcggattcttatatcacaagctgtttgttcttattgatgcaaaaatcagtttaactgaactacgagatccaatcagatttgagacgattagaaaatatgataagcctcaattggtatttggaagaacatcttgtatcaatttacctatggaaaaagagcttttacgctcgattaaacgaaatgctgaccaagaaccgatttcaagcgttcaagttattattggagatcgtccatcttcattagagctgtttgaagaggtatttggacacggtcatgatcctcgtgctttgattgtcaatcgtttgtttgatatgcgatcagtaacgccagaattgaaatacttatatattaatacttcaaccgtggatgaaagagatttagatgaaatagcctatcaagttaatagaataaatgaaatcaaattatataaaagttcacggtccataaaggaaggagagaatgctgaatgaaaaattacctagataactggagactcattgagggttcacttatcgaagaacgaatcaataggatgccctcgtgtttggaaaaagatcatttgtttgaaatcagggaaatgttatcagatgaaggatttgaaccagacgaattctttgtacgttaatatccaactagtggggtgtatatattatgcagagaaaatcaggaagattatttcaccattcatgcagaaaacagtaatttgaagcctatctatgtaacaaaagactttgatgaaaatggcatgaattgttttccttgcaaagaaattacagctgcttttgcattaacggaatgctgatataactatattttcatgtaaggaagagataaaatgcagacctacaaaaaatcactatccatgtatctaggtatagcttgtttcttacttctgcttttctatactctgagcaattggattctgtctttttctgatgcgagtgctgctgagattattaattttgtaatttcggtagatggcttaaatgatttcgttaatcatttttttatctattttttgatgtttcagccaatatcattagcagctggtctaatgggttttctttgtgggttattaggctatgtctacaaaaatgataaaggcgtgtatcgacacaacgaagagcatggttctgcgagatttgcgaaggaatccgaaatggccaagtatgcagacaacgaagagaagaacaacatcattcttaccgaaaaagcacgaatgggtattcataatgatcgtttgcctattgctgttcagagaaataaaaatatctgtgtcatcggtgatcctggcgctggtaaaacacgattctttgtaaaaccgaatttaatgcagatgcaaggaagctatatagtgacagatcccaaagggttattggtacgtgaaacaggcaagatgcttgaagatgctggatacaaaattaagatatttgatttagcgaacctagcaaatagtgatcatttcaatgtgttcaaatacatcaaaaccgaactggatgtggatcgtgtcttagaacagatcacagaaggaacgaaaaaaggcgataaacaaggcgaagatttttggattaaagctgaagctttactcattcgcgcgtttatcgcctttttgtggtttgatggcaaggacaatgattatctacccgacttatcaatgattggagatatgctgcggttttgtgaacggaaagatccaaaaattccaagtccggtagaagattggttcgaagagcagcacgaaaaacatccgaataactatgcgtataagcagtggtcattgtttaatgatttgtaccgggcagaaacaagagcgagcgtattagctattgccgctgcacgttattctgtttttgaccatgaacaagtggttgatatggttaaagaggacacaatggatattgacagttggaacgaagaaaaaacggccgtattcattactattcctgaaactagtgattcttacaatttcttatcagccattttccttgctacagcaatggaaacactgcggcataaagttgataatattttgtccggtgaatggtctttggcacctggaaaaaccttgctccatgtccggttaatactagatgaattcgctaatattggccgcattccaaatattgagaaattcttaggaaccttcagaagtagaaatatgtcaatcgtaattatattgcaagcattaaatcaattgaaaaaaatgtacgaaaaaggttgggcttcaatcgttactttatgtgctagtttgctgttcttaggtggagaagaagaggataccatgaaatatctttctaaacgagctgggaaacagacgatttcgatcaggaattcaacagagcagaatagccggagatccggaggctcaataaataaacagaaacaaggtcgggatctaatgacacctgacgaaattagccgtttaagtggcatggaatgtcttttgtttatatcaaaggaatatgtatttaaagatcagaaatatccgctagaaaaccatccgaatgtccagttgttagcagataaaccaggagatccaaactggtacaagtataagcgatatagaaacgaagttgaggaacttctagacaagattactccagatcagctaattgatcatggtgtgattgaatcagaagcagcataaaaatagtgtgataaagcagctgtaaaaggctgctttttttatttagaaaggaggtgaatttggatggaaaaagacaaaattatgagatcccattctgagcgccaaaaacttgttcaggaagcacacgaaaagaatattgttgatgtggccgttagtttaggaatgggattggttcgtgaaggtagaaattttagttgggatcagcatgatagttttatgatcaacacaaaaaagaatgcattctattggaactctcaaggttttggtggtgatccaataaagctggtacaaacaatgacggattgtagttataaagcaactgtcaattatcttacaggatcagaaatagcagctgtgaaggtcgatacatcagagcctaaagagtttcgttacttcttaaaggatcataaaacgttttcgacagctagaaaatatcttaacgaacaacgaatgatttcaaatgaaacgattgatcaagtgttgtctcaaggagcgctttctcaatctagttatacggattttgagacaaacaagacgcaaccggtgatcgtatttaaagcgattgacgatgtaggaaaagtaagaggtatcactgttcaaggcgtttgggaacagaaggacgacaaacgtccattcctaaaaaagacacatggtgacggtttttcgggtttcatgattaaagttggacagcctcccactgcccaagagttatctgaagataatccattgaaaattattgcttttgaggcgccgattgacttgctgagctattacgaactatttaagaaagatctaggcaatgcggtcttactttcaatgaatgggcttagaaaaggaacgatttcgaagtgtttagccaatcagctaggatctccagtgaaggaaaaagacaaaccggatttcctagatgatctgaataaaaaaatgcagccgaataagttaattcagcttgtgctagctgttgacaatgacaaagcagggcgaaagttcattgatgattttggagccaaaaattttgatgtaactgtacatgtaccggctttgatggaaggcgagacaaaatctgattggaaccaggtattacaacgcttaaaaaagccagttaaagaaccatttaaggatcgattagaacaagcggacaaagtgatcaagcaagagaaacaagagatcgatcaacaaagaatcaatcctgtcgctaaaccaggagagcagccacgaattaatccagtagccagggaagcggaacagccgagaatcaatccgtcagtcacttttaaataagaaggagcgtacaaatgaaaaacacgaattatcaattagaattttccgaagcagctgcaagttatgtttcagatattactaaaacacttgaagataagaaccaggatcagcaagtggaacaaaagaatgaatcgcctgaagatgtattgaccagatcagaagtcgaaaaaatgttagaggaccatttatcaaaaattgaaaatcttatcttgaaccaggagaaacagattgatcaaatggataataatattcctgaagctgaagtaattgaaaagactgaaggctttttggcaaagatcaaagaagctctgaaagagtttgcggatacagtgaagtatttagtcggtgatatgacagatgatgcacgtctgaaggtgaaaaacggaatcaacagtcgtgtattatgcgttaattcgtcaattaagagcttaggcgagaagatcgataagaagtttgcgattgaggaaaaagttgttcgtatcgaccccagagaggcgaaaagaaacgccgcagctttggagaaagaaaagcaaactaaaactgaagcgactgcacaaccgcaaactgatgtagaaattaacttgtcgaaatcagctgaagtcacgtttaatccacctagaattaaccaaggtgcgaatttgtcagaaaaagaagtgaactcattaactacaaatagtttatatgacttcaagaaagtatcagagtttgccttcaataagagagctgcggaaccggaacataattggcaagcacaccaagacaaattcggagatcgtgatcttagccaggcatggaacgtctttatgcaggatgcatggaacattcaagctgagatcacgccaatgatcggctcagagctcgcttcaacctgggaaaaagattattatgatttcttttatgaaggtggaaaagaagcctatgattcatcagttgagaaaggaacgcaattaaattactcacctgaagcaatccagcattttgaaaagctttatgacagtcaaattgctaaggctatgcaagaaagcttagcagatgaaattattggaaaacactcaccagctgctggaaagaaatatagtgaaaagatccaaggggatcaaccattgccacatgaaattcaagaaactccttctcaagagcaaaaggttgctgcaagtaagcctaataaatttgagcaaagaatggcagccgctgttgagaaaaataagatgattgaaaaaaatatggctgaatcgatggataagcatattgtcaatgaaggaccaacaatgaagtaattttgaacaaaaaaagaagcgaacctgtaaaggttcgctcctgaagatgcctcacctaatggaacaatcaaggcttgttctgcctgtacatcttcagcaacttaaatatatcagaaggagaaaacgatgtcaatttacaaactagtcactatagatcagcggtttattgctgaaacaattgctcgaactggtagcgagcagttgttgaataaagttgctcgtagctttgtcggattgtataaccaggacgagaactggtatatcccattaagagcaaacttgggtaagaagaaaccagaaggggcttattttgaaaccccatttgaaactaataatagtcactttaaacggccaggtttagattacgaaaaagcaatatatgtgccaacagattacactattgaaattaggaatactctccctgaagaacaatctgaactcattttttcgaaacaagaagaaatcaaacaatcattcgaagaatatgtttcaagggtggatcaactagatagaaattctccagatttcaagttttcaactgttccattatttcctgatggaattcaaaaaatcaaaagtttgagagaaagcattgtaacaagttcacttaactcagatggaaaagcagaagaatttgaacaggaaattcctgtaattgaggaagctgcacaatcatttattgagaataatcccaacggccattattgggtagtggattggaatgaagggttgaacaactttggagattttgctggctatcctattactggcgaactgcttaataagctcaaagaggtagatgctgcacaagcaatggaacctggatattacaaaagcaaaatggttgaggtttcagaagggaaagttatttctgctttaagaattgaacttggtgcacaaggaaatactaatcgttacttttttgatcgaattgaaaaaaatctttttctgcaaaccaaaactaaagaactgtctaatgagaatgatcaacaacaaactctatttgataatatgatcgatgttttacctgaaggtagtgataacagtcggttggcacaagcaaaaagaaaattagctcgtcttgaacgagagtaccaagataaagttgaccaactttacgaacatcaaaaattaactaatggacaacccatgaatgataaaagaaatggtcgtacttggtttaaacgacgagatcaaattgaagatagggtaagagatctcttaaaggagatcgaagagcaaaaagatcgagttgaaaaactcgactggcaaaacgaagcgaaaaaattaggtattaataagcaaggtggattaatcatgagtgttgataatattccacgaataaaagaagaaattgaaaagtctaaaagaggtgagtccatgtattctagtgcaactattcaaaagtataagaagcagctgaaggaactagagagtgtgaaagaaagctctgaatcagcagaaaataatttgagtgatcatgcgaaggctttaatcgacagtgacgagataaagcaatggtcaaaaaagccgaccatatatttcgttagtggattaagaaaagttgctcttgaattgaatgctgaaggaacgtttgtagaatccaaaaagtatccggccacgactgaagaggcaaagaaaaagatcgctgaattgctatccagcgaagctgttcttacaaaaaaaataccctctgaaaaagaagacagatccattcaagatattattaaaaagaaggactacaaagcactatcgagtcatttaaaggatggaatttcttcttacttagaaaccgatatgtttaaaaattacctgaattttgtatctaaatttcataagtattctcatagaaatgtccggctgctattagctcaaaatccagaaacaacccgagtcgctggatataaaaaatggcaagaagttggtcggacagttaacaaaggagcgaaagctttatacgtctatgctcctggatcaaaagttatgaaggataaaaatggtgagcctgttagagatgaaaacggccaagttgttaaagaaaagtttttcttcttaacgccagtttttgatgtcagtcaaactagcggtgagccgattccaaaaccgatacatgatttggaaggaaattttgaaacgtctgatcagtttgtcaaagtatttaaagctgttgagaacatctctcctgttccaattaagatagagccaatagaaggaaccgcccgtggttattaccacaaggtaaataaagagatcgtcgtgaaaactggactcggtgaaatcatgacgttgaagacattgattcatgagatcacgcatgcaaagttacattcggattcgacttgtgtgttcggagacgagaagtatagccaacaagaatttgaagcggagtcagtagcgtatatcgttagtaatcatttaggaatagacacgagtgattattcatttgggtatcttgcctcatggacaaagcaaggtcagtcagtggattcctttacggaatcattggatagaattacaaaggaagcacaacgaattatcgaatctcttgataaatcgttgtcgctttcttttgcaatgtctgaaccagcaaataaatttgaagaaagaattgctaaagctcaaggccgggatattcaaccaactaagagcgaaactaaaaaggctgcaaaggaaatagaacaagcactcccaaaagaggaacgtcctcgactgaatccttaaaggggaggttgaggacgaatactcaatcgcttctagaaaaaattaaactaccggagaagggaaatgaagtaaatgccagcgaagaatgaaaattactatattgctttatcacaaattctattagttgatccagctagtgagactccaagaattcataccaagagaaaagatatttcaaagagacaaatgattcgtagattagaattgatggtcaaggagtttgaagaactagaaatagaaatcgatgtctcaccgtatcaggatacaattgatcttttgaaaaaaatcaggaatgatcatgaatataacgatctcattcaagaagttgttgactcttatgatccagactttggagtagaaatcgatccggaaaaagaaattgatcatacctggagcgctcaggaaattaaaaatgatcaatcaccacatcagaaaattgaaaatgaagatcatgaaaaaggaaagattcgctcattttagtatctaaaagatttttattgtcgaggtaaagtcaaaaatagtcagaggtataaaaagggggattgggggaaaccccaaacatttcaaagggagtcgtcaatttttgacggctctttttgaaaatatagcgagtgggtacccacttgctctgctcgcaaaaaggttagtctactgatcttgaatttgggttgtcaacagaaaaagtctaatggtgataagtcaagttgaaatttgagattatttttattgaatagactattttgaagcgcactgaactaaacccgactaaaatcaatttttttcgggcgtttcaaggatttgcgtcaataacaaattgttatttatctatcacgctccttggtggcgtgtagagttgatggttacgtagtagcgtatccaccaaacgcgtaaattttcttgcggttaagacgagtgctcgtttgtgttggtgtttaggtacctctttatacttgctttgataaaaagctttatattcaggaagataattttttactgagttggcagcttcaactaagtaataacgaaaatatcgattcccttgcttggtcagaggtgtattttgagactgatagtttccagattgtttaactttccaacttaatccagcgtacttcgccaattttgtttgatcttcaaatcgttcgatttgaccaatttcagcgatcaaaccagcagcgtagacttttccaattcctggaatactggttaaacattgatattctggaatgactataactaattgttcaattgctttatccagctctttgatattcttttcaagagcccgcatttcacaaacaagaacgcccagaacaatatcaatagattcttgggctacagtgcctaagcgatagcttgatctgatggctcgttgaatagccttggcaattttctcgggttgtttgaaacgacctcttcctttttcttggattaagtcactgaaagcttccaaaggaagctcagccagttcatctaacgtgaagtcttctgtcattagagaaatcactgtagcactaaaaagactagtagattcgtctttcatttcacgaacaagtgtgttgcatttgtacgttagattttcaagaaagtgttgctttgtacgagttagttgcttaattaattgataacgagttcgggtcagacgctgtaacgccatgtatttttcttctttaataggagacgtggtaaaacgttgaatgcgtagaaagtcagcaattcttagcgcgtcattacgatctgttttgtcttcatcaaacatgcgtctaaattgtttaattcgaaaaggattttcgatagttacaagcgtattgagcttttttagttcctcgtcttcatgaaaaaacattgaaggatggaaactgtacatggacgttgattccatgccaattataatttgatcaaataggtaattctcattgaactcaagaatcatttctcgtgttaatgaagcaccttcaatgtcattggagactgagatttcagacaatgtagacaactgatcgtcgtcagttaggaaacagacatctaacttttcagaactaacgtcaataccgacaaataatttcatggaagaaggacctcctttcgatctaaattttggaaaatgcttcgatactgtgggatttcccagaagctcactgtgtaaccacaacctcgcctaatagaatacggtgataaaagagctagaagctgccttccaaactactatctgaaagtctagtccattatcgaaacagctaatgagttggtagtgataacagtggttcgggtaacagactttgcaaggtagacaaagctacaggagggcatagcaaattcccgttggatcctttccatgaatccattgtactctgagaaatcacacaataacgaaacaaattccgcaaggaatgtgttattcaataaatttttcgattcagaagcattttgattaaaaagtattagacaaaaactattttacgaggagggctgaccatgaaaaagaaagaaaatcggaaaagaccgattcaaaaaaaggtgtggcttaataaagacgaaaatgattatttaagaaaaaaaatcgaagctagtccatataataactttcaaaattttgtccggatcatgttgattactggtgagattgtgaacgttgattattcagaattaagaaagctaaatcaagaagttagccgaattggtaacaatgttaatcagatggtgcggttagcaaatcaatttgaggaaatatctccagatgatgttcaaacattgattagtgaagttagaaatcttcaagttatggtcacagcagcactaaaaagagaaatgcaaagaggaaaatagaatggtttatacaaagcatttttttattcgttcatttgatcatttaagaaaagcagaagactatattaaagatgctggaaagacaacagtaaaggtaacaacggagaataatcatttaggaaatttatttccttacttgatcaatgaagaaaaaaacttaaacaagaaattagtatcaagttttggaattgcttcagtcgaaaatgctgcggatgagtttactgctacaaaattgaatgcagctgtgacaaagggaacagacctagaagtcgatttacgaacaggaaaattgaaatcactcgaactgaagcaacttgaaacaggaaataaaattctagcacaccatgtaattcaatctttttcaccggatgatcgtttatctcctgaagaaatccacgagatcggccgaaaaacaattcttgagttgacagggaatgaacacgaatttgtcatttcaactcacgttgatcgtgagcatattcataaccatattattttcaattctacgaatatgattacaggaaattcttttcggtggctgaagggaacgaaagtaacacttgaaaaaatttcggataaacatgcaacaagatccggagcgattattattgagaagtctccgaaaaactcgcataagaaatatacaatgtggcaaacagagaacttgtttaagtataaaattaagtcaaggctggattttttactggagcattcaagcaacattgaagatttcaaagagaaagcagccgcgctctatttacatgttgatttctcaaaaaaatggtcaacttttcgactacttgatcaacaacaaactaaaaatactcgagggcgtactctctcaaaaagtgatccggaaaaatacaatttggatcggattgagcaacggctaaaagagaattctacttgtttttcaattgaagaagttattgaacgatacgaagaaaaagaaaacgcagtgaaacatgattttgattatcaggttaaaatcgaaagttggcaagttgatcatgtgaccacaaaaggcatttacttaaatgtagatttcggagtttctaatcatggacaattatttatcggtggttataaagtcgatcaatcagcggatggagatttcaatttgtatgtgaagtacgatgatgttttctattttatgaacgagaagaattctgagcgtaaccgatatatgaatggcgaaacgttggtgaagcaactaagtttatataatggaactgttccactcaaaaaggaaccggttatgtctgaattggatgatattatttccgcaataaatttcttagcagatcataatgtgaatgatggtctgcaacttcaacggttagaaatgaaactggaacgttctttacaggaagcacaaaataaattaaaggaattggatgaaaaactagtggatcttaaccagctagcgaaaaactacttaatcacaaatttagataataaagctgaatctgatcaatcgatagattatgaatcaattcaaaaagaactcgcttctgttaaattaagccgttcgattttgaatgatcgctttaatgaaatcgtaggagaaattgaagtatatcgtgagattcagtatataagtgaagcaactgaagataaaactatttatgatgatacaatgtacaaaaagtgatgttttgtctattggtttgagtgatcgacatatttgataacttagaaaatttcagtgtccaatttaatatatagactataaagtgtaactccgatttttatattattgtaagggtgaatattatgaaagggtagataatgtggtatgaattataatgtattcaaaaagattatggaaggaagtgatccgatatactttgatactaattgcttactgggattttatcacttaccaaagaacgttgtatcaataattattgatatgttttatgagaaacagctctaaacgctgcaaatgctgcttttgacagttttcaaaatcgatggtcccattattctggtgctgtagatgtctggaaacggaactttgcacatgttgaacaactatttgattatggcagcgccattcgaaaaatcatgtacactaccaatgcagttgaaagtgttcattctagtttcagataatgttgattgccaaaatataacatcattaatattatttgttctatttaaaaacgtttgattgataaaagaggaaagacgttgttccaataggtcttgaaatggtcaagctgtacctttacagatataccaaaaaaaagtataagtaaaataacgcattgttagttctgatccagaaatacggatatatccattaaatatctggaaagttaaatcgacaacttttgagtgtttatggaattttttaatcatactgtgtatggttataggatctgtaaaatgttcttcagaaaaatgatttaatgaaaccataccctttaataatagttgttgtaatagatcaaaagaaagagatttatgaatgattggaatgagtaattcttgacaatcttttttattaccgttaaagaggtttccttttcccttcttgtgatgaatcagatcctctttattcaagttttccgcctcatcttttacaatggcacagtatttgataatggtatttccatttttttcggagtcttgctgcaactcctgcgtagtcatctaaacactattaacaaattaagcttgtaaaagtgagagctcaaatagggtttcagaattcaataattgttttataagcaaaaaaatgcaccttttcttttattgaaataaaagaaaaggtgtatttgagttggttcaatatatttgcacaacatttagttgatcaagatccaataactgttacagaattaatggattagtatgatagagtttagttgataaaaaaacaataacggaaattacttttcttataacacatagaaataggaaagttgcttttttattatcttaaattagtttaatctagaaaaaataatttgtcaacagtgattataactaatttcccctttatttcaatgcgaattttaataaacggagcttatttttgtacgggggattctattttgaagtaatatgaccaaaaaaacgatggattaaacgccgtcaaaataatcgtcaaacgaaaggatgattcctctatggtaaaaaaaggagaaaacatatataaacgtaaagatggacgttgggaaggacgatatatcaaggatcgtacttccaataatcgaatcatttacggatctgtgtatggtaaaaaatacgcagatgtaaaggagaaattaacaatagtaaaggcgaaacaattggaaacctcatttctatatcgttcctatgaaggaacgtacgagacttggatggccaattggttgacgattacgatcaaacgaaaagtgaaagcctccacgtattccaactattttcgattaacaaaacgtcacattcttcctaacctaggaaaaaaacaattgcgtgagctttcagaagaccagctccagtattttgtagattcactgttagcccaagaattatcggcgaacacggtacgtttgatctttacgatcttaaaacaatcgctaaacgaggccgtccgtcaaaaatatattccttcgaatccgtgcacttttgttcaattacccaagcataaccaaacagaagtttcagcactatccatcaaggaacaaaaacagttagaaaaattagcttttcaagattcagattgttcgccgatcatcttagcgttgtattctggcttacggattggtgaaatcagcgggctgcgctggacagatatcgattttgaacaaaacttgattcgggtggaacggaccgttcatcgaatcctggatgaacaaaatacggaaacgaaaaccaagcttattttggcaacacctaagacaacgcagtcaaagcgagtggttcctttatcaacaaatttaaaggaatacctgttagaaaaacgagaaaaagcaacttctccttatcttatacatagtaggaacacgctcgcagaacctcgcgtgatcaattatcgctttaagaagttgatacgagcgacctctttttcttccattcatttccatgtgctacgacatacctttgcgactcgttgcttagagcaaggaatggatattgccagcttgagtaaaatcctaggccatcaatcaaccaagctcacattagatacatatgccgattccttacttgaacatcgtcatgaagaaatgaaaaaaatagatctgctttttcaaaaatgagaaccgtgatcggttcctcttttttttgcttcaaaaaccgtcagcgtgatggtcaatttcttttgtaaagatgatcatatcggtctttagaaccttatttcttatttctatgtgttataagaaaaaactatttaattttttccggacacaaaaataacggaaatgtgctgcgacaactatgtagtataaaacaaaataacagataggtacagtgattatttttgaatatcatcaaaataattgagtcttttaacatgaatattgaatgatataccaaaaaaggatctatcaaattgtgaacaagtgagaaagaaaagcgacgctatctattgcttaatggggtattgtttctaatgactgatgattggaagtactaacaattttgctatatttaacagaaattaataattaaaaaaatgctcgattgttcgagtgcttacctatgatgggtatcaatttaaaaaattctacaaaacgtaacagttggtaactatttaatcaatattctaaaaaaaatcaaaaaatctgaaaaataaaatacataagtcgagggagagaataaacatgagccaaatcttactatttactaataatccattaaatgagcagtcatttgaaacgcgattacgacaattaggacacgaagtatttaccactaagacaatgctcaattactgtctaatagaaagtccaatgaaggattttataaaaattttccatcatatcattttaagcgaaacactttcgaacgcagaggttcaagaattattaaaaacacttcatacgtactcgattccagtttatagaaaatcaaatgagctgttagaagaaacgctactcgaagaatggaaagaaaaaggaatagcagaatggatcgaaatcgagccttctatcgaagtattaagagaagtgttaagctcatatatggtcaagcaaggaaaggttatctttttaccacaacaacaaaacaagcgtgaactttcgagtttaatactaagttcaggtgaagagaagctatttcgaattctttatcagaaacaagcgaatgtcctttctagagaagaaatttgtttaaaaatgtggaataaaggaaaaaataattcaacaatgtctcaattatctgtacttgtcaaacatttgaaagataagctttctcaacagcaaattgaaggtccaataattgaaacctgttggggtcaaggctataggttggataaaacagtttatgatcagatatatattgaaagtgaagtaaagatgatataggtgaactatacaatttttagctattaaaaaagccagtttttttataagatatatcttcaagaatatagcctgcgtgcacaatcattcaatcggaggtgttttaaattggaagccaaatatatattattaccatggaattcaatcatcttaatgtgatacgttacccctaactaggacaaagaaatgagccgacccccaaaagttagaccaaaatctaactcttggaggtcggtattttttatgactaaatatagttttgaattcaaattgaaagtagttcaagaatacttagaggggaaaggtggttatagctatttagcaaaggtacattcggttaaggataagaaacaaatacgagtttgggtaaactcctaccgggaatttggggaagaaggtcttctcagaaaacgtaaaaatgcgaattattctgttcaatttaagttggatgcgatagagttatatcaaactagtgagctgtcttatcgtgaaattgccaatgtacttaaaatgaattatccgtctctcatcgccaattggatgagaaaatttcggaatgatggtatcgatggactctcaaaaacgaaaggatgtccatccgccttggctgagaaaaaagaacagaaaaagaagcgttcaattgagacaacaccggaagaacaagaccgtattaaagaattagaaaaacaagtgcgttcccttcagattgaaaatgcctttttaaaagaattgaggaagctgcgaaaacaggaagcccaacaaagacgaacaaatcaatcgcacgaatcatcgacagcctccgaggatccttcaaattagttgagcttcttgaggcgttgaactttcctaaagcaacgtttatgtactggcaaaaaagatttgaccgagaaaatccgaatcaagaaatcgaagccgaaatgcttcgtattcgtaaagaacacaaagattatggctgtttatgaatgacccacgaactaaaagatcgaggctttcatgtcaataaaaagaaagttcaacgtttgattcgaaaactagggatcgaagtccgttcctacacacgaaaatcacgtcgctacagctcttaccgaggaaaggtcggcaaagtggcgaaacaccgaattcgtcgtcatttttacacgaatatttgtcatcaaaaaattacgaccgatacaacagaattcaagtatgttgaaatagataccaaaggcgtgatacgacaaagaaagttatacctggacccgttcatggacatgtataataacgagattctttcgtaccgcatttcagaaaagccgaatgccttggcaattatggaaggtttagaagaatacatcgccatcacggcatcacggctgattgcccctatcgtcgcaccttccattcggatcaagggtgggcttatcaaatgaagtcctatcggcaaaaactaaagaaacagaaaatctttcaaagtatgtctcgcaaaggaaattgtttagataattcaatcatggagaatttcttcagtcttctaaaacaagaaatctttcatggggaaacctatcacagttttgatgaactaaaaacggcgatcgatgactatatctattactacaacaatcaccggatgaaacagaaattgaactggaaaagccctgttcaatttcgaaaagctgcacagaaagtggcataattgcccatcttaacaaacaaaaaaaggagtagatttctctactccgaaaaaagtctaacttttgggggtctcttcaaaataatgaagtcctagttaggggtatttattatgggaaaaagaaaaatgaagcttagtgttgaagagagagtaatcgttgtcaaaaaggttctgaatagagaagttggactaaataaagcagctaaagaagctaaagtttccagagatactatcaagaattggcgtgctatttatgaaaatgaaggtcctactggattagtcgctacaaaaagaataggtgctactccaaagaatcgaaacgtgaagctgttcttgagtatctgaatggaacagatagtttaagaaaagtagccgaaagatataagttaagaaatgaaaaacgacttcgagactggattaagcgatatactacttatggagatttcaaatcagaaagtggtggaagtaaagtgagttaaacaaaaaaattcagtttagaagaacgtctcggacaaagaaaaaccgagcaagaaaattggacgacagtagaaacacaaatcagaatcgctcaactcgaagaacaagtaaaatatcagcagatggaaattgacctattaaaaaagtaaaggaattagaaagaagggatcgctaggacaagtcagaaatatcgttgtttacgaagccaccaaagaactttatgaagaaaaaggatacgcaattcttccgatgtgtaaaatcatgaatgtcaatcgctctgcgtatcggaggtggatccaaaccccttcagtgaaagaaagttagaaaattagtgagtttgcaaaagtattttgggacattcttgatgggcttcatgaaaaaaggtatcgcagtatcaatgatatcttgaatcgagaacacgatatccatgttaataacaaacgtgtgctgcgtatctgccaacatgataggtttcagtcgacgatcaaatattctaccaacagtgttacaaaacaaccagatcaaccgtaccacactgctgaaaacatcttagatcgagagttttctaacgaagcatcgaatcaaagcgggctaactgatgtaatggaattcaagtataatgaaggaaaagaattggaagaattgatcaatggtgaaaaatcaatgatcattcgtggttcggctggtaagaagagtccgcttggtgggcgagcaaaagagaacgatatcctatattttgttgaaaagggcggaaatatggaaatcactcaccgcggtctgctaaccaaagtgattgagaaatacaaaatgactcctgaagaatcaacggagtttatcgaaggttttggacaggagctaaatttatctgaaaaacaaaaaactagatggtatggaaaaaagtgtatcggactctatgaagttagccatttagagaagattgaacccttctattataatcgcgaaaaaaatatggatgattggattattacagacaaccttgaggatattcaattgtaaaaaggataatttttttattagccacccaatgactaggctcaacggtcattgggtggttatttttacgggaagtaagttagtagatttgttgttgacgggagaatattcatatgtaaaaggaggaattcacatgctaatacgtgttagtgcattgctgggtttaacagccttctatttgatttaccttgggaaggcaggggtgctaagaaaaaagggaatcaaggttaacttactgggtgacaaacagagttcgcgtgaaaagtattttgaaattgttttacgattcatgactggatttggtgcgcttattcagtttcttgcgccgtttctatttgctgtgaatcaaacgggatggggatacactggattggtgctgatttttttagcagtattattattctttattgcggtcaaagcgatgggattgaattggcgagcgggctttaatgaacaacaacgaacagaattagtgactactggaatttatcgatttagtcgaaatccggcttttgtggcctttgatttgttgtatctgggttttgcgctgatatttccgaatctccttatgattgtaatggcggtgttggcgttattcctgtttgatttgcagattcgcggagaggaaaactatttgaccactgttttcggtgagcgctatcgggattatcaaaaagcggtgagaagatatttgtaatgcaaaaatttacaatgcatttccattgaatccaattattttccaatcgatttcattttcggtagactaaagaggtcgagacaatttcacgattaaagtcaaaatgatttgttattgtgaaatgtgaggggatgaaggaaatggcatttatcggtgttttatgtttgattttaatcagtacaacagttgcgagtcacttttttagaagattcggcatacctgcggtgatcggccagctgttggtgggaattttgttaggaacggctggcttcaattttgttcatccggatattttagtagaggatttttctgagataggcgtaattctattgatgtttttggctgggatcgaaagtgatttgtccttgcttaagaaatatttccgtccggggatgtatgtggccgttttaggaattctttttccggttttgttaggaacgcttggcgggattgtttttcagattcaactaaatgagtcctttttcttagggctgatcttagcggcaacgtctgtcagtatttcggttgaggttttgaaggaactgaatgtgatcaatactaaagaagggtcgacgattcttggtgcttctgtggtggatgatattttagtcgtcttgatcgtcagcttgagtatgtcctttttaggggcccagggcggaaatgatcggttattgggaatcatgctggtagaacaggtgctattttttgccggtgtattctttttgattcgctggggcgcgccgtatctgatgcggctgagtaaaaagcttttagcggaatcttcagtaatcattgtttcactgattctgtgtttgagtatgtcctacttagccgattttatcggtttaagctcggtgatcggcgcattttttactggcgttgcaattggtcagacaaaggattggaaggatgtccaagttaacgtggaggcaatcggttatgcggtatttatcccagttttctttgtaagtatcggattagaggtttcctttgcgggaatcagcagacaattgttgttcatattacttctgacgataatcgcgattgcttcaaagcttgctggcggcttcattggcggaaaattggctggatttggcaataacagcagcttgatggtaggttcaggaatggtctcgcgaggagagatggccttgatcattgtgcagctaggctatcaaagcggattggtcacagatcattattattcagcgtttattttgattattctgtttacgactttggcttcacctttcttattaaaaagctttacacgtaaaatatattgattaaaaatgactacctaattggcgtatgctggttaggtagttttctggttattagcaataaaaaactgccattaatttttactgacaggtgaagcagattatgcttatgtgaatggaaagattgtccttttgaatcttatacctcaagatttaggtaacggttagggccacgatctcgatttcttctaacccaaacaagttttattctcgccgcgcataggattcagttagacatatctatcgctatattttccaatattataagtcaataagtcagaaggatgctcatcaggctcactgtcttttattgaagaaggtcgtacaggacttgagcattgttctccgtttcattttttgcgccgtagactagggtgattgttttatgttgcttgataattacctgtaattgcttcagagcttctttttgtggaccgctttgtaattcttggtgatacttctcacggaactccggatatttttcggagtcgtgattgaaccatttacgtaactcaggactgggcgcgatttccttcagccacaaatcaattttctccgtttctttggattttcctcgcggccataggcgatctactaacacgcggtagccatcagtatcttctgctggtagataagctcttttcagttttaacatgttgaacacttcctttgctcttttattttaacaaagacagtgataaagagtgagtaaagtaacttttgtggatgagagattttatgctgttgcgaatatctgataaaatagggtagctgaatatataacagatctgaaaggcggttctcatggttgcatttttattattatttagaagcttgtggcacatcttaaaaattttgtttcgacaggaagaacaaaaggcgattatgttggcactgttgtttattttgctgatcgggacggttttttatcataatgttgaggggatgacctatctcgacgcattgtatttttccgtcatgactttagcgacagtcgggtatggggatttagcgccccagacagctttaggaaaactgtttacgattatttatgtgctgattggtgttggaatcatcacgggcgtgattgcgaattttagtcgggctttggctgagtatcataaacagaaaaagcatcatgagaaaagtgtaccggtaaataaggactaacggtttttaacagccgaataaaatgaaagcaggcaacgaataactcattcgctgcctgcttttactagatttcgctgtttcgtcatcgaaaggggaagaaagaagtgtttactttctgctttttttccgccaaaataaccatgaggtgaatgcgatggcaatttatttagaaatacctgaattagataaagagtttccttttcggatattggtgaatgatggcgatattttgaccacgcctcactggcatcgtgaggttgagctgatttatgtgataaaagggacgatctcattggggattgacgatgttccatataaactgagtgaaggtgagatcgcctttattggaggcgggctgattcattatgttttggcttcgcctggaagtgaacgactggtttatcaatttgatttgaattactttacggcaggaaataaagaaaatttggatttacagaagctgttttcagagctgctgccggttagtccgcagtggggagaatcagatgagatagcgatcagaactttgctggaagccatgaatcatgaaatgaagacgcagcaaattggttatcaatttgcgctaaaggctagattgtttgagctgattcaacgactgctacgagacattcccaagcaagtaaagcagccaaagaaaatcaataagctggcgactcaggatgtgctggaaaagctggacgagatttttaattttgtcgaggaacactatcaagaagcgttgactttacaggatatcgctgaagttgccggctatagttcattttattttacgaagttttttaagaaaaatacaggtaaaacattcttaacctttttaaacgattatcggattgataaagctaagtggctgctgatcaatagtgatttaccagtgtcggaaatcattgcacaaacaggctttgaaagtaataaaaccttttatcgtctttttaaaggttcgatggcgatggcccctttagaatatcggaacacgatgaaaattgaataactacttgaaaggcaattactgatacggtaattgcctttcgacaatatttgagaataatacaacaaaaatgggggaataaaaaatttttttcctcgctataataaaagtatcgacacagatgaaaacggatactgaccgagaggaagaaaagataaatgaaaaaagaaacgcaatttttctggggcggagcgatctccgctgcccaaagtgagggggattatttagcagatggtcgacagccttcaaactttgattatttaccgctagatgatcgtcgactgaaagcagtatataagaatcaagcagattcgatcttagcgtctaccggagatgaaatttatcctgggagaaacggcaatgatttttatcaccattatcgagaggatattgctttattaaaagagcttggtgtgaacagttttcgtttttccatttcttggtcgcgaatctttccgacaggggaagaggagcagcccaacgaagcagggctaaaattttatgaggatcttttgaccgaacttgagaagcagcaaatggaaccgattgtcacgttgtctcactttgagatacctatccatttagtcaaaaaatacaacggttgggaagatcgcaaggttattgatttctttcttcattacggcaaaacagtaatgacacgtttcaaagggcgaatcaagtattggattccctttaatgaaatgaatatggttctgcatattccatttatcggcggaggcatcctgtttgaagagggcaaagacaatttgtcaatgcaataccaagcaggccatcatcaattattggcgaatgcgttgatcattcaagcaggaaaagaaattgatccagcaaaccagttcggtgcaatgttagccgctgggaaaacttacgcgtatacttgtgatcccaaagatgtgttcgcggcacttcagcaggagagagagaatttgcttttctccgatgtgcaagtctttggagaatatccgaaattctttgctcattatattgttgaaaagaatttgaagctgaggatcgaccaagaggacgacgaaatccttaaaaagaataccgttgattttgtttccttcagctattattccagtgcttgtaccgcggctgaggagagcggaattgaccgtgtcgctacaaatggctacacaacgctgcgaaatccttatttaccaaaaggcaagagtgtgtggcaggatgatccattaggtttacgaatcaccttgaatcagctgcaggatcgttatcacaaaccgctgttcattgtggagaacgggatcggaactcaggatgagttcgcggatgggaaggtgcaggatgattatcgtatccattatttacaagggcacatcaaaaatctgctgttagcagtagaagaggatggcattgagctgatgggctatctgatgtggggcatcattgatctgcctagtgtcagcgaaggaaagatcagtaagcgctatggggtcatttatgtggaccaggatgatgaaaataagggaacacatcagcgttacaagaaagacagctttgctttttaccaaaaaatcatttcatcaaatggagccgttgtatttgaatagaaaggggtattaaaaatgaaaaagtatcaaccattagtaaaggaaatcattcaaggacttgggggagctgacaacatcaattcagcagtccattgcgcgacccgcttacgttttgatttaaaaaatcaagctgcggcaaatctggaagagctaaagcagattgatggcgtcgtgggtgtaaatcccacaccaacgcagttacaggtaattattggtagtcatgtaggcgatgtttttgaagaagtgattcgtcagggaatagccaatggcgattctgaagtaaaagaggcatcttccgcagcttcaaccaaagaaacgagtattttcaatagagttgtcgatacgattactggctgtatgactccgatgatccctgctttgaccgctgccgggatgatcaaagtaattctctcgttgtcgacgactttccattggatgtcaaatgaatcaagcacttatcgtgtattagattttattggagatggtgctttctattttatgccaattctgttagccgtctttgcagcgaataaatttaaagtcaatacatcaatcgctattattgttgtgggtgttttcctgcatcctaatttcagtcagtgggtagcctcaggcgatccaatctcttttctgggaatgccgattcaaggagtaatctatgcggcttcggtgattccggcgcttttgacgatctgggcgatgtcttatatcgaacgtggcgtggataaaatcaccccgcaatccttgaaaattctgttgaatccaacgctgactttattaatcactgcgcctttagctttgattgtgattggcccattaggtaattatgctggacaaggtttggcttgggtgatcaacttaatgcaaggtcaattaggctttatcatggtagcgctattagcagcagcgatgccgtttatcgttatgaccggaatgcaccatgccttgacaccaatctttgtggcctcttttgccgcaacaggcactgaatccttgattctagtcgcgcaaatctgtgcaaacttggcacaaggtggagcaactttggcagtggcctttaaatcaaaacaaaagaatgtcaaatcaatcgctgcagcggcgggaatttcagctattatgggaatcaccgaaccggccctgtatggaatcacgatgaaatataaaaagtcattagtggcggcttgtattagtgcgggaatttcaggctgttttgccggattgatgcatgtgacgttgtatgtaccgcaaaatagtttgatggcgattctaggtttctcaggtgataagggcacagccaatgtcatcgcaggattatccatgatgttgatgtcggtggttttatcctttgtattgaccttcgttctgcaaaaggacgaaaaaattgaagccacaccgaccgaaaaaactgcggaaggtttggcagtaaattcataaaaaagctgagtagggtagaagaatcttctatcctgctttttggaggatcacttatgaaaatttatttaaatgattacgaaaacgaaaccttggaaaaggcggagagtttgctgtttaacggcaatggatatattggtttgcggggaaatctggaggaggattactacgatcatttttctaccaaccgtgagacctatatcaatggcttttacgaaaccaaagagctgcactatccagagaaaatgtatggcttcaccccaactggagaaaccatgatcagcgtgatcgacgggcaaacaaccttgattaccatcggtggtgaacagttttccattatggaaggaacggtcagtgacagtgagcgttatttggatatggaaaaaggtattacagttagaaatttagtttggacttcgccgcaaggtcgtcaaacaaaaatcacgatctcgcgtttagcctctttccattataaaaatcttttttcactgaagattgatttcgagcgtttgaatcatcaggaggaaattgaacttaccacccatttaaatttctatccagtgcgcacgattgataaaaacgatccgcgcatgagccatgacctacaaaagattgtgattaaggagattgatttagccaaaaagagctgcgtattcggcaccgagtattcccaattggaagcggagttagtttggtcgattaataatcaaacggttgaacaaacgattgaagatgaccgaatcgtgattcgcacaaagctggagtgcgacagttatcaaaaaaatctaagctatgcgtttcagcagcagaagcacgagaaaattgagtgcagctttgccaaactagttcagaaacaaatagaatttctgaatgatttttggcaaagtgcgaaagtaaccatcaaaagtacagaaaaccttgaagagagtgtcaattacagtacctttgctctgctgcaatcacttgggacgaatcataccactagcattgcggctaaaggtttgagcggcagtggttatgaggggcattacttttgggacgcggagatgtttgtctttcctgtcttcttgcatttaaatccgctgctggcaaagcaattgctgacttatcgttatactactttggataaagcacgggagaatcgtcagcttttcggctatcaaacaggggcgctctatccatggagaacgatctcaggaaccgagtcttccccatttttcgaaggcgggtccgctcagcaccatatcaacgcagatattgcttacgcatttattcaatattatcgttatacggacgatttagcttttattgctgactgtggatttgaagttctattggaaacggctcgtgtgttcagcgaaatcggctacatgaaaaacggcaaatttcacattgataaaattaccggaccagacgaatacacggtactggttaatgacaactattacaccaatcaattagttgcttatcaattccaatggctcaatcgcttcgcgaaattattgagagagcatcatcctgaaagctggtccgatttgaacaagaagctccagcttcaagagtcagagttacaggattttgcgcaattttcagcggcgatggccttgccttttgatgaagaaaaaggaataattgctcaggatcgagatttcttgaataaaagcttttggccttactctaaagaagagacaaactatccattattgctgaattatcatccattgacgatttatcgttatcagatttctaaacaagcggatgccgtactggcgttgatgctgtttccagattcctttaacaaggagacaatcgctaagagtgttgcatactacgatgaggtaacgactcatgattcttctctgtcttactcgacgttctcgacggtatatagccgtttgggacaagtagaaaaaggctatgaatactttatcaaaaatgcccgaactgatctggataacagtcataaaaatacgaaggacggtatccacaccgcatcgatgggcggaaccttcatgtcgattatttatggtttttgtaatcttcaggtagtggaagataggctgacaattgatccccatttgccggcagagatcgacgaaatagatttttgtacctattttaaaaatcaaaagtatcgtgtttatgtcagtcatcaggagcattggatcgaaaaagtcgcagaggagcatcaataaatgaaaggttttgtatttgatttagatggtgtgatcaccgatacggcaaaataccattatattgcttggaaacagctagccgctgagatcgggattacgatcgatgaggccttcaacgaacagctgaagggcatcagtcgtcaggattcgctggcgcggattttagcccatggcgataaactggatgtttactccgactcagagttaaatagaatggcagaaaaaaagaatcagcactacgtggcattgttggagacgttagcgcctgaagacgtattgccaggagtcagagaattcttagagaatgcccacgaggtcggaattccttgcgcgattgcctcagcatcaaaaaatgcctcatatattttggacaaattgcagatcagcgactatttttccggtatcgttgatccaacaacgttgacaaaaggcaaacccgatccagaaatttttatcaaagccgcggatataataaatctaaaacctgaagaagtggtcggatttgaagacgcacaggcgggaatcgatggaatcaaaggttgcgggatgtatgccgttggtattgggatagcggagcagttaaaaggtgctgatcgagtagtgaatgatttttcggaattggctatcgaggaattgctttgtttgtagatagttagagactaccagaaattttggtagtctttttttctggaaaaaggagtgatttgtttattttcttgttttgatcctatcacatctcttctgttttatttaaaaaaatcgcggtgaagcaattttgcttgggttacgttctatttattacgcgaaaaatcctattttgcgaattcaaaattttaaattttgtgaagattttaaaattggtagtgggttatttaatgcggtatcattaacgcatacgagaaaacaacaatggtaaaaaggagaggtctagcatggaaataaagaagcttcagcaaaggcaattgttttgtactaaacgtgaaactgttgagaaaaaagtggttcaatatttcgaaaagacacaggatgcagattctgtcgttgaatacgcgattgctctcatggtgcgtcacgcacttgttctgggagatttttcattgttgtttcaggatgtgattcgtgagatttatagccatgctagacccagcaatacactgaaaaattttttgccctacttccaatcttatttcaacgattcagagtggcagcagatcataaagcggttatttatcagtgagaaaaaatacaaaaaggcgacaaaaaatacacggattcaagctagttatttgaagaatacggggagtgcggccattacgaaagaatttggtagttatactcttgtgacgatttataaggatgccagcgggaagaagcatacttggagattaagagatgctgacccgaggaatactgttgaagagacggaacggatacttgagattttgactaatctaacaatctttcaaaaggatggcgtgcgtcgctttgccgaatacattgattatgattgtgcaggtaccactattgtctccagttcacggggaacaaaagaacagacacaggcggcaatctcactccaacatgacgattcacttgctgatgatgcggactttttggaggggtatgatctaaatactcttagtaaagagtcgctgattgtattaataaagcagatatttaaagaagcaaaagcagtaatgctagaggacgaatcgttcttttcaaatgggaaactgtcgacatttaatcaatcatttggcgctgaatcagatttagatgataggatcagttcatttgacaaggaaacgaatcaacatcagtcagataacgtatccagcgaaaccgatggagcagatgagaagatttcagccttggctttagcagataccgccattgtggaagaaattttaccggaaaaatccgtggttaataaaaaaacaaaaagaccaagtaaagagaaaagaaaactcttaaagaagtttcaggataatcataagcgcacttgagaaaaattttttataactggatagtaccgtaaacggagcttcaaaaaaataatcttgatgcggcaatcataaagtcagtctgctttctcagcagttctcatttttccgatggacttcctagttgtaaacgaatacaattgcattaatactagcttttcagtaggcaattgtggaggcgaagagatggaatttattggggttttgtgtctgattttagtgagcgttaccgtagcaagtcacttctcaagaagaataggtataccagcggtgattggacaattactcgtagggattgtactgggaaacgggggattaaaaatcgttcatccagatattctggtgacggatttttctgagatcggggtcattttactgatgtttctagcaggtattgaaagtaatttgcctctgctgcgaaaatatttccgccctggagtttttgtggctttactgggaattctgtttccgctgttattagggacagggagtgggagtctttttggtgttccaatgaatcagtcctttttcttcggactggttttagccgcaacttctgtcagtatttcggtggaggtcttgaaggagctgaaggtagtcaacacaaaagaaggctcaacgattctcggtgctgctgtggttgacgatattttggtagtattgatcgtcagcttgtgcatgccgcttttaggcgtggagaatggcaatgaaaagccgcttggttttatgctgctggcacaggttttgtttttcatagcggtctttttcttgattcgttggggcgctccgtacttaatgaacttgagtaaaaaaatctttgcccagtcttcagtaatcatcgtgtctttgaccttatgtttaagtatgtcctacttggctgatttcattggtttaagttcagtaattggtgctttttcaacaggaattgccatcggtcagaccaatgtttggaaggatgtccgctacaatattgaagcgatcggctatgcggtgttcattccagtctttttcatcagtatcggcttagaagttacctttgaaaatttatcgaagcaattgctttttgtccttgtttttactactattgctattttttcaaaactgctcggcggatatttagggggaagattttctggatttgataatcagagcagcttgatggtgggctcgggaatggtctctcgaggtgagatggccttaattattgttcaattagggtttcaggcccatttggttgtaggaaaatattactcagcgattattctagtaatcctatttacgacattatcctcgccttttttactaaaatactttacaaaaaaactctatgcatgaaaattggcatcctatcgaattataaagcgataggatgtttttcttcattaattttttgcataagcgatcactggtgacaataaaagaaaactaataagtgttccttctcgtaccatcaaagtcagatggaaaaaataagttaaaactaatgcaatcaggatacaaaatagatcaatactatagcgataagatttaaaactgcgctgagttcgttcggaaagaaagagacaaaacgtctcgattggaaatttgagtaattggtatttcaaaacctttcctgtcccgatccccgcgataattgttcctagaataaatagcaggcattttaatagatacgaatgtaacgtaaaaagcggaaaaagaaaataagtaaacagattgatggttgagccgaaaaacagcaaggcaatactcattatcagataattttttactcttaactgtgggtccagcagcagacaagcaatcaaaaataaaaaattcaatccagcagtgattgtgccgatctttatttggctaaattcggcaagtgtggcatttagcgagttgaagctgctgactccgatgctggcttttaaggtcaagctgatgccaaaagcgctgatcagataatacagaaacgagagagttaattttttttgattcatgatagttgttcctccaataactaattgataggatgagtatgccggaaataaaaagttgtaactaggagatatagcctaatgagaaaaaaagaaaaatatactgaggcaacttgtcagctagctttcccctttttatcgccatcgattttaagccaaagctttttgatggactttgatcgaaatgaaaaaattgttgatcaaatgctggagctgcgatatttatttattattttggaagggaaagcacggattattcagcaagaaccaaatgggaaaagtattattttgcagtttctggaagtaggggatctgattggtgagctgaccttagtaaaagctgaagaagcacctaaggatgtaatcgccatcggagcagttcgctgtttggctattccattaaatgtagtcgagaccactttaatgaagcgagtagaattccctacatttatcgctcaatacataggaaagaaattattactgcgaatggaacatttttctcatgctcaaacctttgagctgaaatatcgcctagcttcattattgttggaagttgcggtaaatgatcaatacactgaaaacaatacgcagattgctgattatctaggcgtcagctatcgtcatctgacctatacatttaaatttttgcgtgaaaatgggtacattgaaaggaataagatgggttatttgattcatccagcaaagctgcgcagattgatcaaagcagggaatgaagcttaaaaaaccaagtaaacaaaacttataattcaataaaagaaaaaaaactcctgaattttaaaaaaaaattaggagttttttgttttggaaaaattttttttggtataggtgaataattttaataaccagattgaaattattctaaagtagattgttatttaatctgccttttttcctcttgttctatctcgcgaaccaaacaagatttataggttcaacacttgaaaattgattgaggcttggaaggtgaaaggacttcatttcaaacgtgataaaagctgattgatttgtagctcagacagattgaaaaaaatctgaggtgaacaagaatacttcaaaaggatgtcttctttatcgctgatacttttagtttacaaagaaccaaatagcactaaaagaacgctcagccctgtcagtgtgaatagctatctgtattacgaaaagcgacaaaacaacgtttagaggaatttgtatttaatgtaacaaatcaacttcaaagaggatagagctaaattcgtaatctatttgtaatgtaacatagattatttatttaacaaaaaatatacgtaattcgctttggtttttctaaaaataaaggctctataatatctagtgttggtgacgccttctgttgccaatactttttcttttttctaataaatgcaaacagacaccttgaaatcctttagaataaagtcgacgaaaaccattcaaaggagtgtttcaagatgtcctattcagagtttaccaaagagttactagatattctagacctaaatcttatctttcatgaagatgcctttcgcaaagagcgaatcaatgatgaaacatgttttgtttttgatggcacattgacctatcaaccagaggaatgctttcattgccactatgaaaataagcaaacgatcattaaatggggctggaaaaaagtatccatcttattgaatgatgtcagtaactacaagaccattctgcggattaacaaacagcgcttcaaatgcaaacactgtggaaagacttttttagcagaagattcagttagtgatcgtcgctgctccattgctcgcagagtcaaacaagccattcttgagctattaagtgaacctctttctatgtctttgatcgcacgtatgaagcacatttctccgaccactgtcattcgaatacttcgcagccttcggcctaaaaccgtttctttgaacccactgttaccagaagtggtgtgtttcgatgaattcaaatcggtgaaaaacgtctcgggagccatgagctttgtcatgatggacggcaagtcccatcaactgattgatattgtggaaaatcggcaacttgatcctttacgcgactatttcttgcgctaccctagaaaagtccgtgaacaagtgcgcctagtggtttcagatttctatacaccctatcgcacattggtgaaagagtgttttccgaatgcccgaatcgtcgccgatcgctttcatattagccaacacatcggtcgggcctttaccaaccaccgaattcaagtaatgaagacctttaaaaaaagagatcgtcggacgaagcacttaaagaagtactggagactacttcaaaagaatgcgtgggaattgaagggtcagcatcgctactggcgtccgtcatttcgagatcatctgacagaagcggagatagtcgatcggctattatcttatgatgattccttaaagcgaggctacgaagtctaccaggattttctttccgctatcagaagacaagatgttcctgaattcgtcgcgctcctaaaagaagactacaagaagttgccagggcactaccaaccagtgttcacgaccttcaagaaataccaaacagaaatcaaacgagcgttgcgtgttccctattccaacggccctatagaatgtttgaacaaccatatcaaagtactaaaacgaattgcctatggctttagaaactttcaaaactaccgagaacgaatctttttatatcgaggaaaatatttcaagaaaactaagaacactacccaactgactaaagccagaacaacaacacggctagacaagatagctgtctagccgtgtgagtatctcgattattctattgaatttcttcacccaccaacactcattgacgaagagccaaaataaattgaaattgaattggttataagttaattctcaatttatttaaaaataattataaaaactgactattaaatgtgataggattttgattgtgaaggaggtgagaaagaaatgaaccagcggagaataatttttttcttgttactaattattttactcccaaatctgaatgtcttttctgcaggtgctgaagaaataacgaattctaccagttcatctgagaaaccgaaccaaagtatagaggatagcatgaagctcaacgaaattgcaaatcctgctgaaaccgatacaagcaaggtggatgaaacgacagagtcaacagcgacttcagaagaagcgaaagaagcaacaaaagattctgaaacagaagaaaaaacgacggaaagttcagaagcaaaagaggatagtgaagaggtcgaaaaggctgatttgcgccttttggcagccaatgaggcggaagtaagtacatgggctgattttgtaaatgctattcgagacgaaaacatcaccaaaattatccttgccgcaagcttcgataatcctagtgcatcagatacaaggctttctgcctatgccagaaaaaatgatttagagattgacgggcagggtcaccgagtgaattttaaagattcgtcgatctatttagcttcaccacaaaatgctattgggtccttccacatgcatgatattgtgttaaatcaaacctatgctggagcctattcagaagatatcgtcggaactcgattgattactgcgaacggtgtcaagtggaaatatcgatttgggaatatcaccgctgagtcgggggtgcagcgattagccagagcctctcattcagaggtgagagtatatggcgatatggatattaatacacgagcggaaaatttctatttaggcagtcttattatggaggatggtacccaatataaagggaatgtaaactactataatttctctgtcttttggtacaacaatgcagcgaatgctggatcaaccggagcttccagagagtttacaatcgggaagaattgtcgtgtcgacgttggacaaacgcaaactgcggggcgtacatatcctgctgtttatcatcattatcttgctctaacggttggcgaaaacagtgtgtacaacgtggatatgccaggaaatgcggtacgttttgatgatgctggtgccggaatgacaatcaaaaaaggtgctgtcgtgaatttgacgagtaaacaagcatctggttcagtagtggcctttagtaacaataatacctatctgaatgcagaacctgggagctatctttatgtcattgggacaagtagtcagcctttgatcaatttagcggcggatgctacaggaatcgcgagtgtcaatcgaacagggaattccttaacattaaacagccctgctcaatatgatttgcgaaatttacatgatagtcgaacggcggtaaatgttgcttatgggaatactgcaaataataaattctctattcttgattcagatatcgatttatggaaggtcggtgttccagttcttggaccatctaatgaaacctatgctaaagttccaagtcttgaggtagttggaagcggaagcagagaagttgtaacgacatcggtggcttcactgaatcaattcaaacaggcaaactaccgtcgaatttcaggaatgaatcagaatccaaagattgaatggacgccggttacagatgcggataaaacaattaagggtcgtgtgattattggggaagtacctgataataatggtttagtcgctggagaaatcaaatacattccggtctatgcctcagagaatcaggcgaagctcactttgactgatacttatgggaatgttcgagacaatctattcacagatgtaaatggctatgcttcttactcagatacaaatgacccgattcaatttcaaaaagctggtgaaaaaatttcaggtatcgctgaacggggaccttggctcacacctgatccaattgaaaccaccgttattgatgcaacaccaccagaacccgctaaagtagatcattcggacgccatccaaagtacgactactaagctaacgggaactggggagcctaatagcattataacattaaccgttaatgatcagccatcggggattccaggacagctggtcggcgcggatggaaaatgggaaattgatatctctagtttgaatcttgtgaaggacgatgttcttcaattctttttacaagaccaaagtggacctattactgaacttagtgaagcagaacgtccaagcacaaataacgcgatcggcaatatcaatccaaaaactgatttgaattatcgtgatgcgacattcaaggcagcgacaaaagccaccgtggtagggtatctatctttggcctcagtgccggaaggactagagtttggaaacaatcaagtgtcgaacaagacacaagagtatcgtccaacagtcaatggtgatctggttgtttcagatactcgcggcggagcgaaaaagccttggcgcttaacgttaagtcaatcagaagaactgacaaacggcacggtatcgcttggagatacgctttattacacctctcaattaggggaaaagcaaattacgacagcgacacaaatcgttgagtcgggaacctttgcctctgatggctcaaagaatatatcggctgattggcaaggtagcaacgggttcaagctgacggttccggtcgaaaaacaacgtgtcggagactattcaggaaaattgtcatggaaactagaagatgtcccaggaaattaggtgagtagatgagacgattagttataaatagtttattgatcatgctggcgctctttactactgtgcctgtctttgcggcagatgctaactatgatagtaacggggttacagcgttttacggaaaatatgaatacccaaaagatgaaccagaaaaagaacagccgttggaaaatgaagaaggcaaccaagcctccgtgaatggagaaacacgcggaacagcaggtgagacgacaaatcaattaataagcagattgccgtcttataaaggagaaggcaccatcattccggcgacgggagatacctcaagtctattcgctacattgagtggttttttcttattgtcactcgtcttttttaaactgaaggaggaggagaatggtgaaaaaaattcaattatttagttttcttctcctgctctttacaacctctgttggacaaaaagctgtactggctgatactactgatacacatatgaagtaccaaagcggtggagagacaacggttaagccgcttgatcctttgctgccggacccgttaaaaccagtggtacctgttgatcccactaatccagctggtccgatggaaggtactggcggcagtctttcctttgattttgcctctagctttcaatttggaagtcaggcaatttcgactaaagatgaaacatattatgcgctgccgcaggaatacactgattttgacggaacaaagaaaaagggccccaactatgttcaagtaacggatgttcgcggaactggctcaggttggcaattgagcgtgaaacaaaatggtcaattccaaaccgctgaagcgcaaaagcttgcaggtgctgaactatggcttaaaaatggtgaaatgatctcgactcttccagattcttatgcgccaagcgccaaggaaacgatcgaaatgccattggattcggaagtcaatgttataactgcgaacaatgaagagggaattggcacttggctgtatcggtttggctcagatgaaaccagcggcggacgttcagttcagttaaacgttcccggcagatcggtaaaatatgcaaaaaaatatcaaacttccctaacatggagtttaaaagatgtaccttaaggaaacctaaaaactttattacgaggagaacatgacgatgaaaaacgtaaaattaatgacagtcgcaactttagcagcgttatctttatcaactgctggcggactgattacacaggcggacacagttgattacgattcaaatggtgtagtggaatttattccaaatactgacccgacaaaaccagttgacccaactgatccagacccaacgaacccagttgatccagttgatccgactgatccaacaggtccaaagccaggaacagatggtccgttgtcgattgattatgcttcatcattagactttggggtaaataaaattaccaataaagatgaagtctactatgcaagagctcaacaatacaaagatggacatgcggcaacaccgaactatgttcaggtttctgataatcgcggaaacaatgccggatggaccttgaaagtaaaacaaaatggccaattcaaagcaaccggtacattgaacgatacattgacaggctctcaagtaaaacttgttagtccgaccgtaaacagcaactcaacagctgtgtttccaacagcagcggcaacgatcgagcttgatccagctgggacagaaagcttagtgatgtcagggaaagtgaatcaaggtgctggaacttattctaaccattggggaacagtcgaaacggtcaaagaaaaagataaagacggaaatgaagtagatgctgaagtaaccaaggctgtcacgttagcagtacccggcagtacacccaaagatgcagtgaaatacagcacctcattaacatggagcttatcagacgtaccaggcaactaacattaacttaggaggatgactacaaatgaaaaaatttggttctttatttttagctactgctatcttagcaggaatcaccttagcaccagccgtgagttttgcggctgatggcggggaatacgatacaaacggtgtgattactttcaccccaaataacggaactactgatccggttgatccggttgacccgactaatccggttaagccggttgatccaactgatccaagcgggccaaaaccaggtacggctggcccattgtcgattgattatgcgtcaagtctagattttggttcacaaaaaattacttctaaagatgagatctataaagcaaaagcgcaaaaatatcttgataaggacaacgtagaacaaacggggcctaactttgtacaagtaactgataatcgtggaactgaaaaaggctggacattgcagatgaagcaaaacagtcaatttacgacagcagatgccgacgagttgacaggcgcagaaatcactttcaaaaatgggaatgtcgtaactgcctccgattcagaaaaaccaacaggacaggcaacgatcgttgctgatccatctggagatttgaaaaatgttatgtcggcgaaagatggtcaaggtgctggaacgtatttacttgattggggtacagatgccgcaaccgcagctgaaagtattgaattgagcgtacctggctcaacaacaaaatatgcaaagaaatattcaacaacatttacttgggttcttagtgacgcaccaggaaactaattaaaaaagaagaatgaagaaggggtgttttccagcatccctttctttcactgaaaggataacggtacgatgaaatttagaaaatttgtgatgctgacagttgccattttaagtagtttgatgctgacgacaccggtaatcgcatcggagttcaattttgcggtgactcctaaagcgtcagaaaatcaaatcgacaagcaaaagacgtattttgatttattattggctcctaaccaagaggataccctgactgtagacctgcggaatgatacagataaagaagtcgtgatcgaagcacagataaatagtgcaacaacaaatggcaatggtgtcgttgagtacagtaagaatgagatcaagcctgatgaaacattaaaatacaatataaaagactatgtagaagcgcccgaagagatcacactaaaaccgcaatcagcggctgaatataaagtaaaaatacatatgccaaatgaaaaatttgctggtgttattgccggcgggatcacgtttaaggaaaaaacaacggatcaaacaaacatttcttcagataaaaatgataagggcttggcaatcaagaatgaatattcttatgttgtagctttattaatgcgccaaacaactgagaatggttcaccagacttgaagctgcagcgcgtgattcctaatcaacgaaatgctcgtaatgtcattcaagggaatctgcaaaatcctaatgggacctacttgaatcaattagcgactaagacgattatcacaaaaaaaggcagctccgaagcactttatacggatgaacaatccgatatgcaaatggcgccgaactccaattttaatttatcagtaccgctaaaaggggaccgcttaaaggctggaaaatataccatgaaaattgaggcgtacggtcaacaggatcaaaatggcagctattcgtttcaaaaagaaggcagccagaaagaagaaaactatcgctaccattggacgttggaaaaggatttcgagattaaagcagatgtggctaaaaaattaaatgattcagatgtcacgatcaagaaagattatacatggttgtacattctaattggagtgattctgctattactgatcgtcatattcttagtatggcgcaagaagaaaaatgacaaaaaagatccggtttagcctcattttgatctactgtatggcagtaacattattatttctgccatttattaagcaaacgctgatcatctatcgaacgcaaaatgtcatgatcagccagaaaaaaacagtcacgcctgctgaagaaatcccattagaggctgttcagccgccagatttatcagctgttttagcctttaaagaaaaccaaacatttcaatcagctggacagctcgttatcccaaaagtcgagatcggtctgccgcttttttcaggagtgacgaatgaccagcttttggtcggtgcagggacattatttccagagagaaaagcggaaaaccaaaatatcgttgtgattggccatcacttaggacgaaatgagttattgtttggcaaattgttggaaataactgtcggcgatacggtttatttggaatatcagaaccagttttatcaatacaaagtcagtcagacgaaaatgattcatcaaaccgaacttcaggttttagaagataatggtaaagccgagctaacattgattacctgtgataagccgactcatactgagcagcgttttgtggtaaaagctgagctggttcagcaaccaacaaaagtgattaaacaaaagctgattgaacataaaaaccggatacagcataaaaacaatcgacaaaatcaaagctactgtataattgtatggattctttttctagttagtttggtgattggaacaagaatgatcattaaaatcagcaggtagtctcatggaaggagtgataagatgaaaaaaatgatggcaaaatcattggtggtagtctttggagcatcgatttttctatattcagagcatgcattagccaatactgttatttatgatccgctgaatccgcacaatacgatcactccaatacccaatgctgaccctgagccgagtgaatacctgatagatggcgaaataacgatggaatctgctgagtcgacgccatcgcaggatcaaaaagataatacaaatgtggaaaacacgcaaaataatgaagttcaaagcagcaccgttcaagtcgagagtcagtcagtagccttattgccgacagacgagctgaagcaggaggagaaaacagaagatttctcaataccagatccttatctgccaaaaatgaaaaatcatcataaaaatcaagtcctgatgttagacgatgatttcttttcttccacgaaaagtacagctttgcctcctgatagcggcggaggcaaggctggatcacttaataactttgcggatatcgcacaaagtgcctacttactatcaggtgtcgtcttatacggcgaagcgaacggaaaattggcagcaaggatgagtgattattttgctggatagtttattagcaaaggaagagtggcggaagtatcagcttttacggcaattagagcgaagttcttattttgcgttgtctaaaaaagagatcatggatcacttagagatttccaactatgtgcttaaaagtacgatagagcagttgatccaggatcttgaaaaatatggtttggctcaggagattcatgtttttttagaggaaccctttgttcaattagaaattaccggaacggccagttcagagacacttttagaaaaatatgtggaagaatcaattggcttcaatattttattgagggctgttttagggaacttcaagtcattgaatgagttttccgaaaaatcaatgatcagttatccgattgcatacaataattataagctattgaataagtatcttgctaagtacgagatgaccatcgataaaaaattccgagtaagcggtgaaaatgaaaagaatatccgtttattcttaaccgaacttttttcacgtgtatacaaaggtcgctgccaaattttcgatcaatcgaaggacggtcattttgaagcaaaacaaatgacactggaagatggtaagatgactattcatcaaagaatcggcttgcaacactaccttcacataacaaatttacgaatcaagcagcgaaagtttgttgagagacgaaccgctgatgttttatccagagaagctatcaagcaggctatggaagagtcattttttgaacgggttccaatcgaatctcgcgaagcagaagtgattgcctttttgaattattattattctcgctcagaggaattgagtaaaaatctacgattgaatgcgaataagcaaattatgacgtggagcaaaaatttgctgacaagccttatacaatatttccctaagttaattgagagtccagaaaagtatgaatgttttctgatgaggagtcatattttgcattttcaattgaaggaggtcagccaagccagtgaaacgctgcagccagaaatcaacatcgcttactttcagcaaaattatccaacaatattagaattttgcggggtatatgtgaagcagctgcaagaaaaagattctgaattgtataaaaagaagaagcaggttctttttcaatatctttttctaattttagattcatttccaaaagatgttttggttgaacccatcaacgtatacgtcgatttttccttcggcagtctgtataatcagtttattacggagaatctcaatttctttcatctagttggagcaaagattattacagatgtagaagctgcagatattctattgactgactccagagatttaggaaacgcgtatcatatagattgtgtcgtttggctttctcctccgcgcccgctagattgggcgaatctaggacagaaaatcattcaaaaaagaacagaaaaatcgaatatgacgtagaaagagtatttctttctgcgtttttttgattgattttttgttgcatttgcaacaaaagcgacttataatacgtttataggataggaggttgaaaaggatagaagttcttagagatataggaaagatcgccagagccttagattccatcgcgaacatcgagtttaaggagtaccaactttccaaaggccagtatttatatttgatacgaattttcgaaaatcccggcatcattccagatagattagccgaaatgatcaaggtggatcgcacgacggctgcgcgagcgattaagaagcttgaggaaaaaggttttattagaaaagaagcagatgacgtaaataaaaaaattcgacggttatttgtaacagaagatggcgcaaagctagttccgatcattcaactagaaaatcaatattccgatcaaatcgctttgcaaaacctgtcaaaaaaagaaattgaagcattttccaaagcattaaaaattgtggcagcaacgattgacgatgagtggagctccgtcaaaaaaggcaataaaagaccctatctggagcaaataaacgaatgaggagcaaacaaatgacaaactttattgcagatccatctttttgggagattttccctgaagcgcaaatcaatgtattactcgtaaaaggaatcggagacaatcactcgaaggaaaatgatccttacttgacaaaattattagcagaaggaaaagaagccgctaaacaatttctaacagaggaaacctttagtcaaaacctcgtcgttgcccaatggcgcggcgccttcagccaattcaaaacaaaaaagggcgctcgttcgtcaattgaagcattactgaaaagagttagtcaggatcgagagttttatcccatcaatccgctagtcgatatttacaatagtatctcattggagttcgctgtgccctgcggcggggaagacctgcaaaaaattgcaggcgatattcatttgggtcaagcagctggcggagaagcgtttttacctttaggcgctgaagctgatgcccccgctttaccaggagagatcatctattatgacgaagaaggtgcaatttgccgctgcttgaattggcgagaagcccaacggacaatgctgacagaagaaactcaagatgtcattttctttatggaatcggtcactagcgaacaagcaacacgtgccaatcaagcgatgcaggaattgaaaagacggatcgcggattattttggtgttgaaggaatcgattttgttgtagattccgagcatagaaaagtgaaggcataacgattaaaagcaaggttttgggagattgaattcccaaaccttgcttttgtttataaatatttctccaatcccgctgcaatcccatcctcatcgcaagaaagtgtcacatcatcagcgatttcttttagtgcatctaccgcattgcccatcgcaacaccgatccccgcgtattcgataatggagcggtcgttgtgcccgtcaccaaatgcgatgatgttctctgaatggatgcccatttcaggaaataccgtattcaatgccttcgccttatcaattcctttgtcagtgaactcaaaataaaacggtgcagagaaggcggctgtaacgatttcgtcaaaaggagcatggagtgctggtgcaatcttctgcaaatattctggctgtgctgcgatcaaaatcttgttgatcgggaaggtcgcaaaggctgccagatcatcaatctcactgagtttgaaattaccgccgcgtgcttcatattcaataatattgaatgcgccatcaggtaaatccagcatgccgctgtaaacgtcatttacataaagataatcttctttgtcaatcatcggtatgacatcaaattttttcaagtgttctagaattgcttggcccgtttcgatactcatggcctgattgaaaagtaccttttttgtcagacagtctgtgacgcgcgctccgttgtatgaaacgaggaagccctcatatttggtcatttccaactgctccgccagctctagcatgcctgtcgttgggcgaccggaagctaaaatgactttgatgcctttttcttgtgccgcgatcaaggcttgtttggttttttccgagattatttttcctgtgttcaataacgtaccatcaatatctagtacgattgctttgatagtcattccatcacgtcctaatcaacttgttaccttaagtctactatcggccagataaggtgtaaatggtttcatttgtaaatgacggtggaaaatgatgggatggtatatggttaattttttgattttattggccctcgtccgtatttttcagtgcataacagatagataaagctgatgaatgtacccaatgttccatagacagcatcaacgagatcagtcgtattcataaaaccaagtaaggtttcacacactaagttccctaataaaatccccatacctaaaagtacgatcaaacgaaagttgactccagcgatcagccacgaattgccaatcgctaaataaaaaatcatgcttaaagaaaaatttgaaatatgcgaatggatctctggattgatgaagacaaaatcagttatcggtacactcaaccatctgagaatagtcagtgacgctccaataaatagtagcagaaagtagcaaatccaaaattttcgcttcaatgtgtaacgtgtctcgacgttcatgctttcacctcatcttaaagtataccgtagagggtgaataaggcaatcaatcgtttacattgctttttatggggttatttacgatgataggtatcataaatatggataggagacgtttggcttgagagagtttcattatgaactgattgatgtatttactaaagagccatttggtggaaaccagttggccgtatttaaggatgcggcagggttatctgctaacgagatgcagaaaattacacgcgagctaaatttatctgaggcgacgtttgttacagagttgacgaaggaacaggcgactgtgcacatttttacacctaggcgtgaggttccaatcgcaggacatcctacgataggtacaggctatgtttttgctagggatggagaaatagagacgtatgaaggggggaattcctttctttttgaggaacagatcggtgagattccccttaagctgattaagcagcagcagaaaataacagcggttgagatggttcaacctattccagaattcagggacatttttcgtagcaaagaagtgattggttcactgctttcgatcgattccacagatatatcagaacgcgttccgatgcaggtcgtatctgctggagttccattgatggggattgtggaagatccggcgaccggagcagccagtggtcctctaggggcttatttagcacattatgatttagcttcttcagaaacatctggtaagtatacgattttaagtgaacaaggcatggaaatcgagcgcccgaatcaaatcagaattaatgtgacctacacggatgataaaatcagctttgtcagtattgctggttcatcagtggatatagggagaggaacgattgttttaccaagctaaatagacctgtcatgattgctgtagaagtaggaatcatgacaggtttctttttttgtggtttaaaatttctgttgataatcttgctattgttagaaactatcttaatgaaaaggaagataatttctcactgggatggatgtacacttggtctttgttcatctgtattcttggcgcgatgagaggcacttcatttaatcgttcagcatgtaaacgattggtcagttaattcggaattttcttcattgggagagttaaaaaatcatgtgagctcctctagtgatagtcatttttctatcggtgcttctgtgcctgattcaaaaaatcggattgttagtttgctgctatacatcatatggtgaaccagcattcctatattttacgtttattaggatatccatttggcatctttttgacactttcagaataaactaaggggttatacttattttagaaacgaaagaacatatgttcgtatcgcggacgcgcgagtaaagtcatttcgttttaaatttcagtaggatatttagtgattagactgtgataaaaatgactcatgtttgattatacttactgcactaaaatttttaagaaaagaaaggagtggtacaaatgggaatttggagacttccatttgatgggcagttaatgccttacgaggaaggtcaacagttcggaaataccaaatatccaagaggaagaggatatttccatgatggttatgactttggatcagcgaagtactccggaaatttcaaagctgtaaatgacggcaaagtaatttttgctggatactatggtggagctgttgggtacgcgattgttcttcaaatcgcagagtatcaggtaatgtatcaggaatttggaagtgcttattttgttaaagcaggtgacacagtaaaagttggacaagctctaggaacgctgaccagcaatcacttacacgtaggtatcactatgaaagattggagaaccgctttgtccagctgggatattgatgatggaacgtggttaaatccaattccgattttgacatcaggttcgtcttctggtggtggaacctctaataaaaagaaaggaggagatatcatgttattgttcaaagaaaatggaaaagtttactttttagtaggaaatcaatacacatatgtgaaaaatccaactgaactaagtgcaatcaaaacaatgatgaaacaggccggttatgatacgcatgaacatacaaatacaactcaaattgcttatatcaaacgacttgcaactgaaaagtaatagtaatagagtaatagcttttctcaagtaatttgatcgttgctttaattgaagatgtcaattttcaactaaagtaggattggaagatagtgaaagagcgaaacaatatcggttattgataggagggatgaatattggcgattaacatggaaacagcgattaacaatatgtatgcactaaaaaatcgaggtatcacatattcaatgacaggggctagaacaggcgcagatggtacaggtgattgtagtggaacggtttatgactctttacgtaaggcgggagcaagcgatgctggctgggttttaaataccgattcattgcataactggctagttcaaaacacctttgagtgtattgctacaaataaagagtggacggctaaacgcggagacgtagttatctttggtccaaaaggagctagtggaggttccgcaggtcacgtggtaatttttatcagcaacactcaagtcattcactgtacgtataaatcagcatcagcaaatggcatctatgtagacaacgaagcagcaggctgcccgtactctatgggatggtacgtttaccgtttaaaaggttcgtcaagtggtagtgagaccccaaatacaaagaaaagaggagatatcatgttattgttcaaagaaaatggaaaagtttactttttagtaggaaatcaatacacatatgtgaaaaatccaactgaactaagtgcaatcaaaacaatgatgaaacaagctggttatgatacacatgaacacacaaacacaacccaagttgcttatatcaaacgacttgcaactgaaaagtaatagtaatatcttttctcaagtaatttttatccttgctttagttgaagaggtaaaacttcaactaaagtaggattggaagatgctgtaaatgtcggcaaagtaatttttgctggatacgaaattgttattcaaatcgcagaatatcagataatgcatcaggagtttggaagtacttactttgttaaggtacaggtgacactgtaaaagttggacaagctctaggaatgttgaccagcaatcacttacacgtaggtatcactaagaaagattggagaaccgctttgtccagctgggatattgatgatggggttaaaatccactttcaattttgacatcaggaaagagtctattactaccaaaaatactgcgatgacatgttcttaaaaagggttaaattttattggttacaatttacctatggaaacacttaaaattactttcggtaataagattattgatggttctttccaataccgagtccatatgcgaactaaaggttggtattcttggatgaataatggagctgtcgctgggacaacaggatagaaattacaaatgcaagcagtacagtttcgattagttaaaaaatagaattaaactatatctcagccattttgggttgatgtttttagctctcttataataaagtatcaaaacgtggatgacaggaatcgaacctgcacctcgtattaaatgaaacaaaccgtcgttttaagtcccatttctgagtttaaacaccaagttcatccacaagaagagtgtacgacggttagcttatagaaagcttaaacggatgatagaaaacaaaaagagcgagaatcattcattaattttagaatgttcctcgctcttttcttaatctaaaaatgtcacaactgaactataatgctcttttacttcgctaagaattccatcatctgtgatcaacgcagttaattgaggaagagtagcaaatgtcgcgattgattttttctcgaatttcgtgctatcaatcaaagcgatcgtttgtgaagctaactctaccattcgtttttttagttctacttcatatagattgaaatctgaaagaccctctgtagcagaaatggcgtaggcggaggtaaacaaggtatcgatgttgactttttttagaatttcaattcctaaaacgccttccaccgcattcgaactccccttaacgacgccaccgattaatacaactgtcaaatttagattttcttttaaaagagaggcagtacgcaatccattcgttaacacggtgatacgtaaatcagattgactgatgagtttcgctaactcatagcaagtagagctggcgtctaaaacaatacattcaccattttcaatcagcggaaacgcctttttggcgatctcggctttcttctcaatattcttttgttttcgaatgtcgtaatttttatcgattttcaaggtttcgtcttctttcgaacgagtagcaccaccgtgtgttcggatcaacatattgttatcgctaagataattaaggtctgatcggatggttgcctttgaaacagataatagttcggtcaaatcattcacggagacagaaccccgttcctgtagcaaagcaagaattttttctcttcgttggtttgtatacataagcagttcctccaaaatatctaattgagtatagtataaagcaaaaaaatagaaaaaacaacaatattcaatgatttagttttcgttttaatcgaaaaaacgcgtttttctttcgcttataacgaataaaacgaaaataaacgaaaataatgattgacaaaacgaaagttaacgcttactatgagggtacaaagagaaaaaggagagagaaaaatgaaaattggaattggatcagatcataatgcgtttgagatgaaacgtgaattattcgcatatatagaagcaaagggattcgaaataaaggactatgggtgcttttctccaaacgaggttgactatccggatattgcctttaacgttgcaaacggggtagtaaatcaggaaattgatcgcgggattctctgctgtggaacggggattggcatggcgatggcagccaataaaattcctggagtaagagctgcacaagttcacgatacttattctgcagaacgagcgcaactaagcaacaatgcacagattatcacgatgggttcaaaggttattggtttagaggttgctaaaaaaattgtggacgaatatttgtcagtcacattcgaaggcggcaattctggcagaaagattgatcagatcatggaaaaagaagcagagtattcaaaataggaggaaaaacgatgaaattctttttagacacagcgaatgtagaggaaatcaaacgaattaatcaattaggattggtggatggtgtaacaacgaatcccacgatcatttcaaaggaaggccgagattttaaagaagtgatcactgaaatctgtggattggtcgatggacctgttagtgcagaggtgatcgctcttgataccgagaacatggtgaaggaagctcgagatattgcaacgtgggcggacaatatcgtcgtaaaaattcctatgacagaagatggcctgcgagcagtgaatatcttatctaaagaaggaatcaaaaccaatgtcaccttagtctttacagtcgcacaaggtttaatggccgctaaagcaggtgcaacgttcgttagtccatttgtagggcgcttggatgatatcgctaccgacagcttggcgttgatcagcaatttgaaaaaagtgttaacccaatatggttatcaaacagaaatcatcgccgctagtattcgcaacttaaagcatgtggaagatgtagctgagttaggttcagatatcgcaacgattccaggttctttgttccctaaactttggtcacatccactgaccgatgcaggaattcaagccttcctgaaggattgggaagcctttaaaaaataattgtagaaaaaatttttgaaaggaggaaatatcatgcgtaaaccaattgttggtatcagtttaaagctatatcaaaaccaaattgacgatgctcgaaattttgcccacgctattgttgaagaagtgggtgacgagaaaaaggttgaacaattcatgtgtccgggaatgggtgtgctttatccggtagctatgattttgaaggattcagaaatcggtttgggttcgcaaaacatcgcacctgtgccaaacggcgcctacacaggagaattctcgattgaatctctaaaggaaatgaagggtggctatgccgagattggacacatcgaacgacgcacgcttttcaacgaaacggacgatatgatcaatcaaaaagtccgcttggcactagattacgaagtgacaccggtcttgtgtatcggtgaagttacgaaaacagagaattatcaagagattaaagcgctaatgaagaaacaactatttctggatttattccaaatcgagggcaagaaggcagagaaaattattttagcttacgaaccggcttgggcagtggggaaaacctgtgcagccagcgcagttcatgtgcagcaggttcatggattgattcgtgaatgcatcaaggaattatacgatatccaaacgtcagaaaacattcgcatcatatacggtggatcagtttcgcaggaaaatacaaagctaatcgtttccgatgaaaatgtcgatggtgtattcgttggtcgttttgggcataatccgaaacaatatgcatcaattgttgaaacagtaaaaaaagtaaaggaggggtaaacatgtttggcattattttagtatcccatagtcagaaaattactgatggaacaaaagaaatgatcgaagaaatgactggtaccaacgatgcagtgcgaattatttctgcaggcggtacaggtgatgggcggctaggcaccaactcgatcatgatcatggaggcaatcgaagagaatgcggactgccatcatatattaattttctgcgatattggaagcgctattctaagctcggaaacagcgattgacttgattgatgatgaagagctggcgatgaaaacggaaatcatggattgtccgttagttgagggggcatttgcggcagccgttcaggcaaccgtttgtcaggagaaggaaaccataatccaagagttagcacagctgtaaagctttgttgaataaaaaaagtgaggagcgaaagaaatgaagtttctgagaagtatggtaggttacacgatcgctggcactattgtaatgtctgtttggaatgagttaggcagttttggcatctttggcggttacttggcagctggaattattattggacccatgtggtttatgaatcattacttgaatttgacaggcaacgaagatgatgcagcatttgttgatatggggcttgcaattggtatttgcggaattgctcgagatacgttcatgcagggttcatctgtattaactgatgcattaccaacaatcgcattagtcatcgtgggtgcggttattggtgggatcgtagctgcagcttttgaaaaaagtgtggcaaaagaagaacaacgcgatgaaaaggcacctgaaccaggaatgacagaaaaagagttagatcgtttagttggcgaagaataatccattaagaaacggaggaaaaataatgtctttgggcttaggacttgcaacagtatgcggcggatttttattcccatttgtaattcgcatggcatgggggaaaatggtagatcactgggggccaatcggaggctggatggccgcactctttattgttggaactgtttggtgtatcaatcacggtatttcaacaccgatgatcgcacaaacaggtgcgtgggtcgatcaagggctggcagctggtatcggtgtctgggtagcttctgcattggtcggcgggaacgtgaaaaaatcacttcctaagattgtcgcagccgtatcaggaggattactaggcggcttgctattgtcattgttcttataaaaaaaatgcagcataacaactaaaaactatattgttaggagaatgggaagatgaaacgtttaatcaatgatggctatgaagtagtagaagaaatgctggagggttatgcagcagcgaacaagcaatatgtggacttggacttggaaaatcgtgtcgttgtcagtaaattaatgagtgaagaaccgcgcgttcgcgtaattgtcggcggtggatcagggcatgagccgatgttcttaggctatgttggaaaagattttgcggatgcggcggttgttggaaacgtgaatacttcaccggcaccggatgcttgttacgaagctgtgaaagcggttgatagtggaaaaggttgtctctatttatatggaaattacgcaggcgatgtgatgaattttgatatgggtgcggaaatggcgttagaagaagatggtattcgggtagaaacggtcacgactaccgatgatgtctattcggctaaagataaaaaagatcggcgtggcgtggctggcgacttgccagtcttcaaagtagctggaagtgctgcggcgaagggttatgacctagataaagtcaaagcagtgactgaaaaagccaatgacaatacctattcattgggtgtggcgctatcttcttcaactttacctgttaccggcgaagtgattttccaaatggacgaaggcgatatggagatcggtatggggattcatggagaaccgggaattgaacgtcgtaaagttgaaaaagccgatgtgattattgatgagatgatgaagatcattttggaagattctaaaattgcagccggtgatgaggtgtatgtattagttaacggattaggggctttaccggtaatggaccaatatgtctgctatcgacgagtggatcaaatcctaaatgaaaaagggattaatatccatcgcacagatgtggggaattttgcgacttcgatggatatggtcggaatgtccgtcacattggtgaagctggacgatgagatcaaagaattgcttgatgcaccatgtgatacaccttattataaattataagaaaagggtttcatttctggtattaggctttaccataggaacacgaaattagaaagaatgaggtgtgctttatgagtgaaatggtgttagataagcagttttttgccgacagtttagcgaaaatggcagagcttgcggaagtaaatcgtgattattggacaaaattagattcagacattggtgatggcgatcatggaatcaatttaagcattggttttcgagcggtgaatgccaacttgcaggataatttagaaaaagcgccagatatcagtacgctgctaaaaaaatccggcatgctgctgttgagtaaagtcggcggcgcatcaggtcccttatatggcagcttctttatcaaaatgggcaaagaggatacaggtaaagagacagtcactttcccagagtttgccgggatgctgaaaaatggtgtcgaagccgtgcaactgcggggaaaagcagaattacaggataaaactatgattgatgcgttgcttccagggatcgaatacttagaagcacacaagaacgatgaggatgccattgcggtaatggaagaaacagtcgcgatcatgaagcaaggagcagaatcaaccattcctttggttgcaaaaaagggtcgggcaatgcgtttaggtgaacgtgccgtgggacataaagatcctggttcggaatcatcgtggatgctgatgaatatctttctagaggaaatgaaaaaaatagagtgaacggaagattattatgacaaaattagaacaaaaagcattggagctgcgggagtggattatccgttctctggcttcagcaggatcgggacatccaggcggatcactttcggcgatcgatattttaacgacgctttattatcaagagatggatatttcggtggagaattacgatcaaaaagatcgcgaccactttattctttccaaaggtcatgcggcgccagctttatatacggtgttagcagataagggctttttccctaaagaggagctgcttgatttgcgaaaattcggctgtcatttacaaggacatccggatcggatcaagacgaaaggtgttgattcttcaagcggttcgttaggtcaaggcttatccatcgcgaatgggttggctttggctcagcgtttagacgggattcaaaaaaaggtttatattttgatcggtgatggtgagctgcaggaagggcaggtctgggaagcagccatgacagctgcgcattacaaattaagtaatgtgattgcctttgttgataacaacggactgcagatagacggaacaaatgatgaagtaatgggtgtaaaggatatcggacagaaatttgcagcctttaactggaacgttttgactgccgacggacatgattttgattcattaacagcagcgatcaaggaagcgaaagctcaagaaaaggcaccgactgtcatcgtctgtcaaacgaccaaaggcaaaggggtaagctttatggaagatcaagtcggctggcatggcaaagcaccttcgtcagaggaagctgaaaaagcgctcgctgagctgaaggaggtgttgtaagatgaaaaaagccacaagacaagcctatggcgaaacactagcaaaacttaaagatcatcctgacttggtcgtattggatgccgatctatccgcagcaactaaaaccgatatttttgccaagacggcaccggagaaattcttcaatatgggaattgccgaagcagatatgatcggtactgcggcaggcttcgctttaggcggcaagcgtccttttgccagtagctttgcgatttttgcagcaggacgggcttatgaacagatccgcaatgccgttgcctatcaaaagctaaatgtgacaattgccgctactcacgctggggttaccgtcggcgaagacggtgggtcccatcaggcgatcgaagatattgctttaatgcgggcgattccagggatgacgattatcaatccagtggacgatctggaaacagaagctgcgatcgaaacgattttggcgcatgaaggtccggtctatctgcgtttgggacgtttagctgtagaacgagttcacgaagaaaagcgaccttttgtaatcggaaaaggtgaaacgttagtagagggcaatgatggaacgatcattgcgacaggcttgatggttcaagaatctctcaaagcagcaaagcaattagccgaacaaggtactaagattcgtgtattgaacttttctactatcaaaccattagatgaagaattagtcctacaggtggctaaagaaacaccatggattattactgctgaagaacatagtgtgatcggcggattaggtagtgcggtttcagaattcctatctgagaatcaaccaacaaaagtgataaaaatcggtgttcaagaccaattcggccaatcaggaaatccagaattgttgaaagaacattacggtttaacagcgaaaaatataattaataaagtaaaacaattaagttcctaaaaaaaagcagatcaagcgaaaaaatttcgtttgatctgctttttattaacattaaaggaagtataacattttaagcggtcaaaggattgatacatcaatcttttgaccgcttttcatttggtctttttcctattaaactggagatatgaaacccaatattttacacgccattttctttgatgaatatcaaaactgggagaaattcaatcaaaggtacacgagaaggattcgaaccgttgtgaaaagagaagtgaagaagtttcgcgattgtggtgaccttaaaaaaggttatcgtctattgtctgtgaaggatgccatgatgtaaagaaagtggcttttcgttgtaaagggaaattttgtccaacttgtgcaactggggaaagtcaacggtgggcagaggttgcggcgaatgatctgtttacagtgacgcatcgacacgtcatcttcacgatcgatgaaggtttacgtgagatttttctgaaggagaagtatcgtaaggagcttttaaaaggattaatggatgaagctgcacggatactattagatttttttaggatttattgctcaatcagaaaaagttgaatagttcatttcatagaagtctttcttaatcgtaggtgctagtttcagctttctcctgctcaaaattaataaacaactgaaatcccttgtcctcttcatcctgatcccaaatctcaactaacttaggcactatttcaatcaaaatttcactatctttatgaggataggcattatagcttttttcccaatgcttttgatacaactcttggaaggagtggtctggctgatcaacgactaagccgtgatttacagcaattccttcaatttgaactccccaatagcaaatcgccactcgcggattctcgattagctgctttgtctttcggaaattcttgtctgttttaaataggattttgccttcgtgaatgatcacgctgacattgcgcaccatcacatggtcgttcaaactagtggctaatgccataatctttttttgtcctagtttctgataaaagtgttcaaccgctgtctgaaagtccattataaatactcccgtctaagaaagatggcgcgcaatcgatcaagagaaaaatagacaatcgcagtggtgactccgtatttaattaaattaaagggaatgattccaatgacaactaatttccaaacactgtctaccattggattgactgcttgtgtcatggcgatgatcgcctccatcgacattccgtataatttggtataaaaggggatgatgaaatagacatttgatagacacgccacaaaagtaactaacgctgtgccagctaacattccttttagtgccgagcctttgttagttgatcgttggtaaaataggctcgcaggtaaaataaaactcaggctcaaaataaagttctgaatttcaccagtaaacatcgaagcagttccgactgtcgctaacttgattaaaagtttgatcaatacgataaagatccccgaaacaggccccaataaaaatgctcctaacagctctggaatcccagccaaatcaaagtccataaacggcggcataaatggcaaagggaacttaaatagcatcaaaacgtaggaaagagctccaaaaattgcgatcatgactaattttcttgcagtaaatttcatttctaacacacctttctttaaacataaaaaagaaccttacaacaacatttgcaaggcacagtcacagtagaaaaaggtggtttgattcatcaaatagcgtttgttatctgaagatcaacaaacacacacttttcttcttccatccagactgtactgtcggtctcagaattgcactgagtcagccaaaaggctcgcggactatcaccgccggtcgggaattaaaccctgccctgaagaacttattgtatttattttcacatggttccagtgagaatgcaagcgtttttttgaattaaaagtaactagctgaagcctgcattaaaaaaagtttatgaaaagtgtcataaaagaacagatttaaatcattgatatatcatgttccagtaagcatcggggacatttatttctcgaacttttttccagccttccttttcataaaaagctagtgccggagtgtttcgtgataagcattttaatttcattggcatttctaagtagtgcttcgctttttccaaaagctgatgaccagctccttgtcctttatagcgactatcgacaaataggcaatggatgaagttatctggaacatataaagaaataaagccaatgactgtttcttcgacttctgcaacgaagacaagttcagcctccgtatcacgatcaaaatcctctaaatgcatcaactcgggatcatcccaataaaaagttgtacgccgactttctagatataattgtctaagtcttggcttatcttgaagggtcatttcacgaatgtgaatcaagcaaattctcctttcattaaagtatctgacttaaaaattttttttcaaacttactttagcatattttagtcgaaagattgaatgatttttattactaatggttggtgaatagaagaattagaaaaactccgaccaaataactagatgaaaaatacacctttcgacccatgacaaatcaaagaagattgagcataatattgacataagataaaaacacatcgcgagtgggaaaaacaaaatacattcaaatcgggttccaaaaaaaatgttttttgggaaaaggagaaaattaaaatgaaaaaattgacgaaatcacaaaacaatcgagtattaacagggacgttagccggaattgcggactattttggaattgatcctacaactgcacgtgtcatctttgtcttcctaagctttttcttggaaggtgcaccaatcttactttatctattgcttgtgttgcttgttcctaaagcagaaagtgagagcagagcctaccaacaaccctatgaatcatcaacaggcaatcaggcaaaacaagcagaagcagttgccgacgatacatggagcgatttctaattagaaaaacagcgcttaaatcttaagcttaaaatataatccgaagagtgaactaaaaaaaacagttcactctttttgcgagtcaaactttttacagtttgtttggttcaagtgaagaacagacatctcactggaattattgattgagtaatatagtttgatcgtatgcgtgatgagaataaaataagctttttcggtttttgaaaagttttttcaattgaaacgaattagctgtcagtccgacttttcacagtttttacttttagaatcgaatcaacaacaagaataaatttattctatgaatatagtcctttcgacccatgacgtgacgacgagggttgtgcataatagactcatagaacatttcgtcgaggagagattatcatgaatgaacggcaaaaaattttagaatccattaaaaaggggatattatcaccagaggaaggcttggatttattagagagtcttggattaaatgaagaaacaaaatcagaatcagcaccagagactgaagaagaaccaatagttgaagaaccatcagcaactgaaacagtggaagaacctgtaaataaattagaacaagaggaaacatcccaacatgaagctgagtttgaaggggaaatcaaatcaaaagactttttaggacttgttgaggatgaagaaaagacagaaattgaaaaggacttggaatttgataacgatgtaacaattgaaaaaatatccgaatcggatttagcggatgatgaccttctggagcagccagcattcgaagagccagcagaggccgaaacagaattagtgctagaaccagaaacaccagaagaagcactatcagaaaagccgcaatcctctgacagtgtttccagcatgattgatgagtgggaaaacaagaaatcagaacctaaagaggaagatccagtacgatcaaaaattgatgaatttgatgaagcgttgcaaacgaaaatagaagctttgcgagagaaaaaagaagaatttagagaacttaatcttgaagctgagctgggaatcatttcagctgaaaatgaagtaatctataatcaaatgaagatcgagctgaaggaacgggaagaagaaatcgaactattgaagcatgagcgtcgagcgattgacgaggatatgtttgtttcgccagaaggtccttatgtatcagatggattttttgaagtcccagatgattttgaagagcaaaagtaccgtccaatggatcgtcctcatgaggaaccaacagacttggccagccgtattgcacggatggtaacgagaacaaccgagagagtttcagacaaggtaactaatgatttcgactggaaaaagatgaatcaaaaattttacggaacggcaaaaacacattttagtcatcaattcacctttgaagatatagatgccaaaaccatcgatattaaattggcaaaagggaaagtaattttgaagacttgggaagatgagacaatcaatgatataaaagttgaggcaacagtcgctcttctaggtaaaatggaggagccagatccaatcgacgcctttttagaacgcagccatatcgacattaataactatcaaatactcttccatgtaccgaataaacgagtggacgccaaattgaccttctacttaccaagacgtcaatacaatcatctttctgtccgtttactgacaggtgatttgatgattgaggaacttgtagctaagaatgcttcgattaaagcaacgaatggaacagtgttgattaaagaacttgatgcctcgatgctggagtttgaaggtaccaacaatgacgttgaaattcgcgaaggacagattacgaatgcattgattgagacagttaccggtacaatcatttcaaaagcggatgtcgtgcgatcagaatattccttgatcaacggagacatcaaattatccgcaggcaatgagaatttgaaaaaaatcgaagctcaatccgtcaatggaaatgtcaaggtttcattgccgcaaacggtaggtatcgaaggggtagccaaaacaggagtcggtacgattaattatcgctttgccaattgtgaaaccatgcaagagcgaaatggcaacacccagaaagtactgcattttcaacgagcagcaggagaatcagctgaaatcgaggtttcttcgaaggctggtaacatcttcctgaaggactatgagagatagaagggacaaattaaaatgagaaaaagaatgacaaaatcacaatcaaatcgaatgctcactggaaccattggtgggatcgccgaatattttggtatcgatcctactatcgcacgggtcatctttgtttttatcagtgtcatcttggtaggtgcaccagtatttctttatatactactggcattaatcattccaagagctgacagtagcagaggaaataattaccaacaataccattatgaacgtccaaaacagtcgaaaaagcaacgcaaacgtgctgaagcagtcgaagaagacaattggagtgacttttagtcgccgatttgagaattacttaattcaatcaaaaagacatttcttgattttttgagaaatgtcttttttctatagggaaagcataaaaatttctcatgaataattcgctttacagcaagcaggtaggtatatccatatgaacgagcttttctatgcagacaatgattgctaaattccattaagtaccgacaataagtaaaaatatttcgaaattaccaagaaacacaatgatcgaagaaaacagatgttgattagtgcctaattgggtcctaaaagttgagcgactccgcaaagcccttcttaaggagatgcggaagaaaaattcttcgtgcttatttcaataaaaatggcgaaaaaaaacactatatccatacgtagaaaaagggtaaaataaaaacaataaaaaagtagaatcaaaaaacgttatttaatttaaaacttttgaattcacgctttaggattggtagaagtatgataccgtacaaaagtatcattgttaacgaagttggaggagataggatggattttcgtcaggttttaggaacaagcaacagacgacgattagaattgattgaactgttgtattataaccgacaaggggtgtcgagcgatgcgattcttaacgagttagattgttcattgccgattttattgaatgatattagtcttatcaatgacttgcaggatgattttattgttgaaaagtcaaagggattgcatcaggtaaagctcaaggaagggatcagcattggaaaactgtatgctgaggcgttgaccaattcactcgaattcaagattgttgaacatttattatatgagaccagtgacaacatcgaagggttatcgaaaaaattatatttgagttcttctaatacccaacggtacttaaaaaagatagagattgatttaaaacgtgtaggtattcaactatgctatcgtccgttacgtatagtggggaaagaaagtgtggtccggcacttttattatcggtactttactgaaaaacagtatacattaaagacagtattgccagatttgagcgagaactatctaaaagtgattaaaaattttgttctagagtttattaaaataaatgggatgcaaaaccagcatatttttcaaaaacgtgtggcttacaatctgtttatcagcctgtggcgaataaaaaacaaacatgcttatcctcaagaagaacttcgaacgaagccgttattattgccagaaggaaaaacagtagaagcactcagttcgatgattaaagaagtttttcaactgacggtatcagatgagctgttacgggattgcttatggttgtccttctcggattcacttattttcagtcaagagcatagaaaggcagcgctaaaggataatccccgttatagaaagcttttcaagaagcacacggaattgacggaagattttacaaggttgttaggcggagcacttgatgaggaacgaaaaatcgagttaacgaccgttttattgaatgccacatatctttttgacgaaaagggtgactttctctccattttgcgaaaaaatcggactatttttctagacatggtcgccattatgcaccagcatgcagtggagaaggtgacagatatcgtggaagcctttgtccataagcacgcaatctatcagacgcgagattttattacaacgtatgtctatctcttgctgacagaagaagaaaaaagtctggagctgttggcttcacaggatgaacctcatcatttattattagtttccgatcttacccctacggaagagaagtttatctcaagggtgatcactcagatcgtttatggaaattttgagatacaccatttagacgaattatgggacagtcatgaggagatgattaagaaggttctatcttatgatgggctgattacaacagggccgaaagaaggtattcctaaggattttccttttgtttcaatggacccttacgtaacaccgcaagcgattgtggcgattcaaaatcttgtcaatgatttatccgaaagaaaacgggatgttctactatctggaaatagtatcaacgaatagtaaaaatcaggtatctctttgaaaagggatgcctgattttttgcataggaagaatttttagatgctaatattcagccatgatccttgttaatattttactcaaggtttctaggtcagtatcaatcgttgattctaaccaatctgacaaaatgctgattatgcccgacacagcaaaggagacctcgatataactttggagatcatttggatcgaggctttcggcggcaatcacctttgcgatcaatacttctttgatttttctcaaatcatttctacctctagtttctttaacgagtaactgaaagatcgtttggttctctgagacaaaagaaattaagttctgacaaaaggttttaaaatctgtgatttggtcgtttggataggttgtgtcgaaaagaaggataagtgcctccagcttgtcatcaaggagctggttatgcagatcataaatgtcagaataatgagtgtaaaaggtgcctctgccgatatctgccagctcggtgatttcagaaattgaaattttattgattggcttgttttgcaacagtgagagataagccgacgcaatcgctctttttgttttgcgcgtccttcgatccatctttcacctttttcctagacaactgtcttcaaactgttcaaaaatgaacagttttgtagatattgcctatagtattcttattttgcattcattatattagacatatgaacattattcaacagttgttcaagaataggagggataaaatggatactatcgaaatcaaacaaataagtattaatgacttggagcaggcaagaaaattcgcggaacagggcatgcaccttgattggtacgtcaataattccctcgagctatttctttacagcaaatacgtgctgtatcttgagctctcgaaatcaacagttgctttaggtgcttatttaggtgaacgtttagtaggatttttgttcgcacgatttaagaatgaagaacctgccattgaatcaataaagcataagctgtttttaaaacttggatcgggcttaattaatctatctggtcataaggacaattctgatgcttacgatcaagcgaataaagagatgcttcaggcattttcaaagaaaaactatgaaggagagctgactttttttgctgttgatcctgaactaaaaggaaaacgaattggaacactgctgcttgaaaagctggtctcattgaagagaggcaagacaatttacttatatacagattcaggctctacttatcagttctatcttcatcgtggattcgagattttcagtcaaaaggaagtcaatatgacagtgaacaaaaaagaaatcaaactgacctgttttttgatgtacaagcaactgtagaaaaatactttttcaagaatcgcttgaattgtaaataactaatttcctgagattatttttacatgtcgaaaaaaatacattattaaactggaggtatgtcttttaataatttaaaaaataactttttaaataacgtcagcacgatcgttcaaaaagctattttctgctgctttttgcttgaaaaattatttatcatgagtaaaattataagtgaaggaagataaaaaaaaagaaaggaatggtcaaaatggctaacaacatgattcctcgtcgctctgatttatttgacatgacacctttcaatttttttgaggactttggacggaatttttttgaaggcttcaagggcaatatggttaagacagatatccacgaaacagacaacgagtatttgctagaggcggaattacctggaattcctaaggaaaacatccaaatcaattatgaaaatggcatattgacgattgaaggaaaacaccaaacagatacgcaaaaggaagatgacaagggcaatttggtaagaagtgagcgaagcttcagcagtgttcgccgacaatttgcaattagaaatgtgagagaagaagatatcaaggctgagtacaaggacggaattttgaaggttactttgccaaaatcagcggaaaaattggaacgcaagaccgctatcccaattgaatagaacgagtaaaggagctgtgacaagaatcttgtcacagctccttttccgaataaacggtgctctaaagtagcttcttcggagataagctgaaatttcttcttatttcttgaagcagaccacttctgtcaaaactttttttcttctgtatgtgtaaatgctgataaaagtgattcaactgagactaaaataactcattccttttattttttaactcctctgtgcagtaagacataaaaactgataaggctgaggagcatgcaggtagccacaagtcctttacccagattactcgttaaaaattcctgagaaacagggattctgtagagaacacccattattgcagtagtaagcaagatagggacaaaaggggttaactcctttttgtgtgtttgtctgagaaagaaaatcccacagctcaggataattatagcgattattgagattccgactaggcctcctgtgtcgagagtcaagctggttttaaaaaagattgtcagactgattccaagaatgataaacattattgttagaaagattgccagatattttttgaaagttcgtttagtcgtatatatgttatttccaatctgccatacaataattattgcgaggatagtccagtaaatactgccaatcaataattttcccacatcaagtaatgtattaggtgaagcaagtgaagggattacagtgataagcgcgtaaacaaatagaacagcgaccgctaaatgtaccccatttccaatactgatgggtacttctttcaacagagcatcagcgatttcctttggttgtttgccgaagtaatcttcagcagtttccccattttcctgagcatcgagaatatcctggaggatctctaaaagtgcttcctctaatattttttcatctttgaaaacggagttgcttctaacgtagattaataaatttccataatattcttcgttgattggatttaagagttcctgtaatttcgcattttctttgatgagccatgtttttttcattttaattattctccttcaataatttttcaacattccccgacaaaaacacccactgcttgatgaacgattccttttcgttaagaccattttctgttaaatggtaatactttcgttgtggtccctcatcagaagcacgcatttcaccaacaattaacccttttttatccatattcatcaatagaggatagatagttcctttagggatactatcaaatccaaatttttgcagctcttcactaattttatagccatataattcttttttggacagaataatcaagatgcagcccatcaaaattcctttaagcatttgagatgaaacctgttgattcatgcgtacccctctttctactagtttgcttaacaatatagtaaagtattttcaactatattgcaatgcaaactagtagaataatctttacgttcaggacagaaaaataaccgtttaggatagtttgaacttattgtatcgaaattcctttatagtgttagctatagcagaaggcgtattttagaaagaagggaagagatctttttggtaagggaaacaagtagaataaagcagctaaatcataaagtattgcggagtttgcaaaatcttacaaagaaacggaaacagttgctattttgtctgctgattttatgtgtattctgtttatttggctttctcaatgcctatgctgtcaataactcgacttggttagaaggaacttggtcaaatcagtcggtgaaatattcaatcaaagcgaaaagtaatgaccacagatgttggaatatcagacaaaatggttacattctaatgaaagatgcgaaaatcacagcaaactcttcaaagagaaatattatcctaaccagagaagatagccaaacagaataccatatcgtcaagctggaaaaagaccgattagaattgcaattgcaaatttttaacaatcaaaagaaaattaaagcaatcaagctgaaaaaagttaaatgatatttttactttattaaaattatgggataaaaatattgcattctatcttttcttttcttcaaatttgtttacaataaagaatgtgagaatgaaactgcctcttaacatctaaactctctttctaacccggtagttttatttttataggtagtttttttgaggtatttgagaaatgctggacttgcaataagcagtctccaacaaaatgacaccttgccctacgaagagcagtgaggagccatttacttctcgctacgaagtcgattgattcgtcactctctagtaagacaaaagtataagctattcacagccttggactttcaaataagaaagtccaaggtttttactattaagcgaagaaatatgtttggcaaacagaaaaaaattgcaagttgttcggacatatatagtaatccttgatcctttctgttaatctgtatacaaagactaacggaaaagaaaggagaaactatgaatcaatcaaaatatcaaacaatcgccgatgaattgaaatcaaagattctttcaggcgaatatccagaaaatacaacaatccctcccgaactacaattgcaaaaggattatcaggtcagccgacatacgattcggcaagcaattgccttattagcgaatgagggctttcttagaaaggagaagggttcaggaacctatgtggacgtgaaatataggcgtggggaaaatacacactccgctcacaagaccatcggcgtggtcaccacctacttatcagattacatatttccttcgatcattcgtggtatcgaaaaaacattgcgggaaaaaggttattcgttattattagccagtaccaacaatgattttcagcaggagaaggaatgtattgagaagatgattacccaaggagtggaagggttgattgttgaaccaacaaaaagtaatcaatacaatccaaatttggctttgtatgttcgattaaaggaacagggaattccgatggtgatgatcaatgcggtctatgaagaaatcagcgcgccctatatttgtgtcaatgatgtcgccagcgggtatctagcaacagagtatctaattaaaaagaatcataaaaaactgttgctaataacgaagatcgatgacctacaagggaaatatcggatgaaagggtttatcaaagcctgcgaagagtacggcatccaattttctccagaggatattattacctatgagaccgaaacgagaaaggacgtctatgagcgggtaatagcacgtctagagtcagaattacttacaggcattgtgtgttataacgaccagatcgccagtggattagtagatcagctaactgcagctaagttcaagattccagaggagctatcgattgtcgggaatgatgattcagctttaagtaagctcggaaatgttaagctgactacattgaatcatccgaaagaccaaatgggacatgatgcggcaaactggatcattgaggcgattgaagaaggacacgatccagagaatattctatatgaacctacattgatcgaacgtgaatcagtgaaacaattataataagttgggaaaaacagctcatttcggtgagttgttttttttgttgactggaatatttgtacgaacaaaacataagattttaattgacatgtacgtacataaaatgtatgataacggtaacaaaagagaaaaaaggaggagattcctatcgatacgaaggaaatgattgcaaaaaccaagctggatattatggatggccggacagctttagggattgagtttggttcaactagaatcaaagcagtcttgatcggttccgatttggttccgattgcagcaggtagcttcgagtgggaaaatacgctggagaatggaatttggacctattcacttgaggatatttggaagggcttacgagtcagctatcgtaaaatggcgacagaagtatttgagaagtacggtgaaacgctgacaacaatcggttcaatcggctttagtgcaatgatgcatggttacatggcgtttgataaaaatgatgagttgctagtgccttttagaacgtggcggaactcgattacagaggaggcagaaaagcagttaacggaaattttccagtataatatcccacaacgctggagcatcgcccatttgtatcaagcgattttgaacaaagaggagcacgtaagtgaagttcgatttttgactactttggcaggttatattcattggcagatgaccggacaaaaggttttgggagtaggtgatgcgtctggaatgttcccaatcgagactgaaacaaagaattatgatcaaaagatgctgaagcaatttagcgacttaactaaaggtactgccttcaagcaagagctgaatcaagtgctgcctaaggtcttactagctggggaatcagctggcaacttgacgaaagaaggagcatatttacttgatccgacaggtactttgcaggagggaattcctctttgtccgccagaaggtgatgcggggactggcatggtggcaaccaacagtgtacgtcaaagaactgggaatgtgtcggctggaacctcagcttttgccatgattgtccttgaagaaaagctcaagcaggttcatccggaaatcgatttggtcactacaccagtaggcgatttagtagcaatggttcatacaaataattgttcttcagaaatcaacgcctgggtcaatttgttcaaggaattttctgacgcactaggtttagaaatcagtggagacaaactgtatcatacgctatttgaaaaagcattggagggcacctctgattgcggcgggatgctttcttacggttactattcaggcgaaaatatcaccggaatgaatgaaggacgtccattatttgtccgaacacctgaaagtaagtttgatttagctaactttatgcgtctgcatttatctagtgcctttggtgcaatgcgcatcggaatggagattttgaaaaaggaaaatatcaagatcgataagctcgtcgggcatggcggaatcttcaagacaccagaagtaggtcaaagaatcttggcttcagcgatggaggcgccggtaacggtgatggcgacagcaggtgaaggtggtgcttgggggatcgctttacttgctgcttaccaattagaagaaaatctttctctgtcagattttctagaacaaaaagtatttgcgaggagtgaaggagtgaccatcgaaccgacaacagaagatctacaaggatatagtcagtttattgatcgctacgagaaaggtttatcgatcgaagccgaggcgatcacttcgttataataaggatttcagtttgtcgtacacacatgacaaaaaagaaccatttgcctgatcgtgcagcaactgcatggatgacgatacaaggcaagagaaaaaatgaatactttaatacgaattatgaaacgaatgaggagcgaagttgaaatgttagagcatttaaaggaagaggtttttcaggctaatttggaattacccaagcaaggcttgatcaaatatacttggggaaatgtcagtgcatttgacaaagagacgggctattttgtcatcaaaccaagcggcgtaagctatgaacaaatgcaagcatccgatatggtcgttgtcgatttagacaacaatgtaattgagggggaattgaatccttcttctgatacaccgacccatgctgtgttgtacaaagcctttcctgaaatcggcgggatttgccacacccattccacttgggcaaccatttgggcacaggcaggactggatttaccggcaatggggacgacccatgcagatactttctacggcaaagttccatgtgcaagatttttaacccaagaagagattgacgttggctatgagcacgaaacaggaaatgtcatcattgaaacttttaaagaacgcgggattgatgttatggagatacctggtgtgctattacatggacatggaccatttacttggggaaaagatgcagatagcgccgtcatgaacgcggttgttttagatgaggttgccaaaatgaatctttttgcacgtcaattgaacagtttttccgaagaattgccacagcgtattttagataagcattatttaagaaaacacggaaaaaatgcctattatgggcaaggtaaataaaacatcaatgttaaaaaggagcggacagctatgttagaagtgagcaaaaaagaattttggtttgtcgtaggatcgcagcatttatatggagaagaagcgctgaaaagtgtaaaagctgatgcagaagcgatcgtaaaaggactgaatgatagcggaaaaatgaactatcccatcgtgttaaaggaattagcggtaacttctgatacgattacaaaaattatgaaggaagtcaattatcgtgatgaggtggcaggtgtaatcacctggatgcacaccttctcaccagcaaaaatgtggattcgtgggaccaaattattacaaaaacccttgctgcatttagcgacacagttcaatgaaagtattccttgggaaactatcgacatggactttatgaatttgaatcaatcggctcatggggaccgtgagcatggctttattaatgcccgcttgaaaaagcaaaatcaaatcgttgttggctattggcaaacagaaagcgtccaaaaacaaattgctgactggatggacgttgcagtagcatataacgaaagctttaacatcaaggtggctcgttttggtgacaatatgcgtaatgttgccgtgacagaaggtgataaggttgaagcgcagattcagttcggctgggtcgttgattacttcggtattggtgatttggtgcagtacgttgatgcggtcgaagacaaagaagtggatgctctatttgccgaatacaaagaattatatgattttgattatggcgattatgatcgggcgacttgggaagcccacgttaaggtgcaagcgaaacaagaaatcggcattcgccgtttcttagaagcaggtgattacaatgcctttacttcaaactttgaagacctttatggtatgcagcaattacctggactagcggtgcaacgcttgatggcagaaggatatggttttgctggagaaggcgactggaaaacagccgctttggatcgtttgatgaaagtcatggcgcataatcaaaacactggatttatggaagattacacgtatgaattagctgctggaaaagaatccatcctgcaatcccatatgatggaagttgatccaacattggctgttaataaacctaagattgttgtctcaccattatcaatgggcgaccgtgaagatccggctcgtttggtatttgatggaaaagctggtgacggcgtggtagtctcaatggcagactttggaacgcattataaattattaatcaatgaggttgaagcgtttgaaccaacagaagaagcaccaaaattaccagtggctcgtgtgctttggaaggtaaaaccaaacttccatgaaggggtaggtaaatggatcgaagtcggcggcggacaccatacggttgtatctttgaatcttacgactgaacaaatcattacatgggcgaagttggttgatttagaatatgtgacaatcaagtagaagataaaatattggcttggaaataatcaagtcaatattttattaaactaataaaagtaaaaaatactattaatttgagcgtaaaggtttacttttaaggcaattaaaggtatattgtactaaaataataaaagtaaaaaaaactataaaggggttctcattgtatgaacagcaattatgattcaaaggaatatattgaaaaggtagatgcatggtggcgtgcagcaaactatatttccgttgcacaaatgtatttgaaggacaatcctttgttaaggaagccattgaaaaaagaagatgttaagacgcatccaatcggccactggggaacgattgcgggtcaaaactttctctatgctcatttaaatcgggtaatcaataaatatgatttaaatatgttttatattgaaggtcccggtcatggtggtcaagtcatggtgtcaaattcctatatcgatggcagctacagtgaaatttatccagaagtcactgaagatgaagctggattgaaaaaattatttaagatgttctcattcccaggcggaatcgcctcacatgcggcaccagaaacacctggctctatccacgaaggcggagagcttggctactcactctcgcatgcgacaggtgcaatcttagacaatccagatgtgattgccgcaactgttgtaggtgatggcgaagcggaaaccggtcctttagctggcggttggttctcaaatgtgtttatcaatccagtaaatgatggtgcagtattaccgattgtttatttaaatggcggaaaaatttcaaatccaacaattctttctcgtaagagcgatgaatatttacaaaaatatttcgaaggtcttggctggaaaccttattttgtggaagggactgatcctgaaaaagttcatccagtaatggctgaaacattggataaagtaatcacagaaatcaaaacgatccaagcagaggctcgtaaaggtaaagcggaagatgctaagatgccgcaatggccagtcatcttattccgtacaccaaaaggctggactggtccgcaaacttgggatggcgaacaattagaaggaaccttccgtgcgcatcaagtaccaatcccagtaagttcagaagatatggaacatgctgataaattagtagattggttgaaatcgtatcgtccagaagaattatttgatgaaaccggaaaaatcgtcgatgaattgaaagaaatctcaccaaaaggcgatcgtcggatgtctaccaatccaatcaccaatggcggaattgatccaaaaccaatgactatgccaaattggaaacaatatgcgattgatacgacaacaccaggtgcggtaatggcacaagacatgatcgtctttggtcaacaagctcgggatatgatcactgaaaatccaaccaatttccgcatctttggaccagatgaaacgaaatccaaccgtttgaacaaagtctttgatgtgacgaatcgtcaatggatggaaccaaaaaacagtaccgacgaatggcaatcatcggttggtcgtgtgattgatggtcaattatctgaacaccaagctgaaggtttcttggaaggttatgtattaactggtcgtcatggtttctttgccagctacgaatcattcttgcgtgtggttgactcgatgttaacgcaacatttcaaatggatgcgtaaagctagcgctcatgcttggcgcaaagaatatccagcgttaaatctgattgcaacttctacggtcttccagcaagatcataatggctatacccaccaagatccaggtgtgttgactcatttagctgagaagaaaccagaatttattcgtgaatatctgcctgcagacgcaaacagcctaatggcagttatggataaagcgatgcaagacaaacaagtgattaacttgatcgtttcaagtaaacacccacgtccacaattctattctgcgaacgaagcagaagaattggtcgaaaaaggattgaaggtcattgattgggcaagtactgataatggggaagaaccagatgttgtgattgcagcagccggaaccgaacctaacttggaagctttagcggctgtatcgattctgaatgaacagttttctgatttgaagattcgctttgtcaatgtcgtggatatcttgaaactacgtcatcctgatattgatcctcgtggattgactgacgaagagttcgatgaaatctttactacggataaaccaatcgtctttgctttccatggatacgaaggtatggttcgtgacatcttctttgatcgtcacaatcataatctgcatattcatggttatcgtgaaaatggtgatattacaacgccatttgatatgcgtgtcttcagtgagttggaccgcttccatttagctcaagaagcagcgaatgcagtttatgcagaagatgcaaaagacttctcagtacaaatggatgaaacattggcaaaacatcatgactttattcgaacagaaggtcgtgatcttccggaagtagaaaactggaaatggcaagaactgaagagaaaagggtatcactttagttaagcatgcgtttcattaagaaatttaattactgaataaagacctgtaaacagcgccgcttctgacgtgtttacaggtctttttatagtagtgatcttgtttttcgatattcctttggcgaaacgccttcttttcgtttaaagatatagctgaaataattagggtcattgtagccaatttctgatgcaatgcttgaaagcttccaatcggtttcttttaacaggagttttgcttcattcagccgctgttcagtcagatattcaacaaaggtctttcccacagattgtgaaaaaacagtactaaaatgtgagctgctgagatttgtatgggaggcaacatcgcccaaagtcagttctggatctgagaaattctgtttaatataaagaatcgcttgttcaataagatcacgatactgtcgcatactttcatcaataaccgtacgttttaaaaaatccaacacctgatttaaataattacgaaataatgtactatcagaaataatcgctgagagattggaaggtgtggcgatcggaaattttgtttttactttcttatttttttcttccactaattggttcaattcatttagcagagctagacgatacaacaaggtgttttcacttttttcagctttctctatcaattcatcgatcagtaaatgaagtgtttgtgtggtaatttgatcaattttcttctttaagtcaatttctttttcgtattgattcattttcataccaaagggctgataatagaggatttgatgatgtgtttgtattaaggaatagtccaatagatttttagcggtttgatagctttgttgaatctcactgattcgttcgacaggattaccaactgcaataacgagctttgattcagcattacttaatttggagtagagtgtgacggcaacctgatcggccttgcttaagagctcttctttattggtatcgaaaagaagtattttaataaaacgagaagacagacaggagaaaagtaagttttcatcatcgacaaatagtttagtcattttttctcgaaaatgctcgtagtcagcaaaattcttatttatatgattggcgatcagtaatacgctgaatttttttcctgctatttttctgttcagctgtctcgcttcttcgatcgcttctgacgtggaaactcgattttcaaatagtgtattcaaaaaaagattcttttttacgtcgtaggagtaggagtcaatggcagccggttgctttttttgctctaattgagtaatgacttttttgatactagctttcagttcgtcaattttaattggtttcaacaaatactctgccacttgtaaatggatggccgctttggcgtaagtaaattcatcaaagccgctgataaagataatttgaatatcaggaagattctgtcggacttcttgcgagagttcgattccatccataaagggcatacggatatccgttaataagatatctggctgcagttcgagaatcattgagagagcgacttcaccgtcaccagcttcacctgcgatttcgattggaagcttctcggaaagctgtgttaagtttcgttttaaagattcaaggatcaggtgctcatcttcagcgataaaaactttgtacatgttttgtggctcctttttgcatagtcgggacagtcacatggacagttgtccctttgtctacaatactcgtgatcgtgattttcgcttcttttccatagtaaagcaataggcgtttgtttacattgaacaacccatagccttctgtaaagtcagtatctaaaccatccgccaattcctgattgatttccttcagcttctgttctggaatgccttttccattatcaataatataaaaatgaagttcgtcctgttcgcctaaaaaggcctgtacgataatctttcctgttcgtcgaaccagttttgttccgtgataaaccgcattttcaattagcggctgcagaatcatttttagtatggaatagtctttgattttttcttcgatttcgattgaataagtcagagcatcgccatagcgtatttgtaaaatgatcaagtaatcatgaatatgtttaatttccttttcaacaggaatccaatcctgtccttgacttaaggaaattctgaagaagtcagaaagggcataggtcatttctttgaccttttcactttctcccatctcttctaagactaaaatggcgtctaagctattataaatgaaatgtggagtaatttgtgcttgaagtactcgtacttcgctttgagctagattgtattgcttcaaagcattttcttccaaaagaaccaccagattatccgccatttcattcatactgttgcttagtttctgcaattcatttcccggcagcgtgttgatccgataattcagtttgccgtcagaaagggcatccgccatatggatcatttcctccattggctgctggatctgcttcatcaagcgcgtatttgtcgatcttgtaaagaagataatcgctgcgataatgaaagcttcgatcacggataatacaatgatggattgtcggacttgctgactttggttcgctgcaagcttgatttcaacattgacgaagtcttgcaaaatatcgtgaactaaattagttgccgattctacatgaaccattaattcctgattttcttggaagggttcgttggcttcaatgttagctacgatcttttccaaataattattcacattatccaacgagcgagtgacaatatttagcgtcgcgcgttcttgggtgctttgcgtattctttttaatctggcggatttcctttttaatgcgatggacgttattacttttagtaaattcttcaggagtcagttgtccataagtgagactccaagcttcttctataattttttcttctacgtcattagcgatacgattggcttcggaaatattgccaacactgcgctcataggtgaaaaggtagcgggtatatatcaacacgctgattatcagcgggacaatggataagactagcatcagccaactgatacgctgcaagagtgatttgatggtcgtctgttttttcatcagttgcctcctaataatttcttgggggaattgtagaaagagaattttgatcagaaaaaactgtatcagaaacatagatatcttcagagattgtcttattgtcaaaatagcgcttgacagtatttgcgacgagctctcccatgaatggattacattcaacaacacagttgaccttacgcttttttagcagatcaatcatttctttctgagcatcaatggagacaacaacgaatttgttttcaagttgatgttcgtcaagggcatctagtgctcctaaagtcatttcatcattgtgagaataaatgacgtcaatattattaagcttgccggcttcgatggcttctgagaatttctcttttgcctttaatcgaataaaatcaccagtgatcgtttgggtaatctgtattcgcggatcacgtccgactgtttcggcgaacccatcgtggcgtaaacgagtcggtgaagaattttcaacgcctttaatctcaaaaacattaatggcttctttttcgattttttgataatgatttgtcacatataaaccagcacgtccgccttgtgctttgaaactagaaccaatatgggtcaaaaaaagatcggatctatttgtagcgatatttcgatccacaattattactggaatattggcttttttcgcctcctctaaaacaggttcccagccaaattcttcgatcggagaaagaataatcaaatctacctgataggcgataaacgtcattacgtcttggtattgctgcttagggtcagagaagctgttccgagacatcacttgatagttttgcttctccaattcctctttgatggatttactctggatcttacgccagttgctttcgatcccagcttgagcgaatccaatcgtgatttcgctatgattttcttttggcgtgtcttgtttgcagcccgctaacataaggcacaagccaatcagcaggagtaggttgatttttttcatagggtacacctcgtattaaaggattttttacaaaaagatcgtttgaacctcacgaacagattctattgctgattaattagcctttgccaataccaattcactttatatcgttaatctttcttctattatatagcgctatcatttgtaattctaacatgctggcgtattccgaataaatgtcaagatttagcaaaaaaaatccaagaaaactgtaaaaaagaaaaaaagttcccgattattccaagaaagtaaaaaagaatctcaatgaaagcgtttgccttaaaacgtacacttagcttatcaaatatgttttggagggaaagatatgaaacgagggttcaaaaaaatgttagtggcaacagtttcactacttgcgctgacagcactaactgcttgtggaaaaggaaatgcttcaggggaggacaaagggtttgttggtgtatccatgcctaccaaatcagccgaacgatggatcgctgatggagacaatatcgtgaagcaattgaaaaagaaaggctacaaaacagacttacaatacggcgaggataaagttgaaaatcaagttgcacaaattgaaaatatgattactaaaggggtcgacacattggtgatcgcttcgatcgatggctccgcacttaccgatgtgttggaaaaggcgcatcaagcagatattaaagttattgcctatgaccgcctattgatgaattcgaagtatgtcgactattatgcaacctttgataatttcggcgttggagttctacaagcttcatatatagaagaccaattgggcttaaaagatggcaaaggaccttacaatattgaattattcggcggttctccagatgataacaatgcactaatcaattataacggagtgatgtcggtcttcaaaccttattttgacagtaagcaattaatcgttccatctggccaaacaaaattcaatcaaatcgctactttgcgttgggatggttcgactgctcagtcgcgaatggataaccttttaagtgccaattatacagacaagaaattagatgctgtcttatctccatatgatccaattagcctgggaattatttcttcattaaaaggagttggctatggttcaggcgacaaaccattaccagttatcacaggtcaagacgcaaccatcgcaggcgtgaaatcaattattgctggtgaacagacagaaacaatctttaaagatacacgtattttagcagataacaccgttgaaatgattgaagcgattcacgatgacaaaaaagtgccagttaatgacaaggaaacttacgataacggtgaaaaagtcgtgccaacttatctagcaaaacctgtttctgttgataaagacaactataagcaagagctgattgatacgaaatactacaaagaaaaagatttaagcgaataacaggatctgagaaaagtactggcagctttgccgtacttttctcgatcatcttgataaggaagtggaaaaatggccgactacatattggaaatgaaaaatatcattaaagaattctccggtgtacgcgccttggatgacgtgaatctgagtatcaagcggggagaaatccatgcgctttgcggagaaaatggtgcaggtaaatcaacgttaatgaatgttcttagtggactcttttcttatggcaattattcaggcgatattatttatgacggtaagacctgtcagttcaaagggctgcgagatagtgaggaaaaaggcattgtaattatccatcaagagttagccttgagtccttatctatcgatcaaagaaaatatttttttaggcaatgagcaaaccaatcatgggatcattgattggaacctaacagaacgaaaaaccgaaaacttgctaaaaacagtggggctaaaaatcaatccgaatactttggtctcacaaattggtgtaggtcatcaacagctagttgagatcgctaaagccttctccaaaaatgttcgattgcttatcttggatgaaccaacggccgccttgaatgaagaagaaagtgcgaatctgcttgaactgattaaggaatttcgcaatcagggaattacttcaatcatcatttcccacaaattgaatgagatcgtagatgtggcggatcggatcaccattttacgagatggtcaaacgatcgagactttagagaatgaagacatcaatgaagaacgcatcatcaaaggcatggtcggacgagatctcaccaaccgttatcctgaccgccatccgaatatcggtgaagttctttttgaagtcaaggactggaccgttcatcatccgattgataccgcaagagtaatgaacaatcacatcaatttcaatattcgacgaggtgaaattgttgggatcgctggtttaatgggggccggacgaaccgaatttgctatgagtatttttgggaaatcctacggcagcaatatcagcggacagatttttaaagacggtaaggaaataaaaattaacgatgtttctcaggcaattcaacatggcttagcgtatgtatctgaggaccgaaaagcagtcgggttgaacttgctgatggatattcgtgaaaataccacgattgccagtcttggaaaaattagtaaaagcggcattcttgataaggaaaaagaagtgacagaagcagaaaattatcgtaagaaaatgcggaccaaggccaataatgtctttcaaaatgtaggcagtctaagcggcgggaatcagcaaaaggtggttttagcgaaatggttaatgaccgaaccggatgttcttttcttggatgagcctacacgcggaatcgatgttggagcgaagtacgagatttataccatcattgaggagatggccgcccaaggaaaatgtgtctgcattatctcgtctgaactgccagagattatcgggatgtgtgatcgcatctataccatgaatgaaggaacgatgaccggtgaagtcatgcgcgcagatgccaaccaagaaacgctgatgaacttgatgacgaaggaagaggaggcagtatcctaatggagaatgcaacgaaggaaagtaaggaaaaaagtacgattaatataaaagaaaaagtcttagatatttttagcaaatacagcatggttattattttgatcgctttattgatcgcttttcaaatgatgaccggaggaattttccttcgaccactaaatattacgaacattgtcctgcaaaacagtcatattctagttttagccgcaggtatgctgctggttgtattgttaggatttgttgatttgtctgtcggttcagtcatggcgtttgtcggcgcaattgccggaatgatgatggtgaacaaccacatgagtccttggattgcagtgcctgtttgtctagcaatcggcacgttgatcggagcatggcaaggattttgggtagcctatgtcggtatcccagccttcatcgtgacgctcgctggattattaatgttccgcggtttgacgcaagtcgtacttggcggacaatcactcgcaccgtttccaagagcctttcaaaaaatttcaacaggctatttaccagaaattatggtttcctcttcaggcatgcactttttaaccttggttttaggtttagttttagccgcaggtttagttttcttccaatggaaagcacgggaaaaacgcaaaaagaatctgtttgaagtaccttcaatgaacgcctttatctttaaggccattttgactgtcgggattgttttaggaatgagttatatttttgcctcataccaaggatttccaattatcctgatcattttaggtgtgattgtcggcgtgtatggcttcttaaccaacagtaccgttgcaggtcgtcagatttatgcgacaggtggtaatttgaaagctgcccagctttcagggatcaaaaccaagaaaattactttctgggtctttgtcaatatgggcatgatggccgctttagcgggcttaatcttggccgctcgtctgaatgcggcgacaccacaagctggaacttctttagaattagatgcgatggcttctgtatacttcggtggcgcttctacttcaggtggtatcggaaccattactggagcgatcgtcggtggcttggttatgggggtcttgaacaatgggatgtcgattcttggtgtcggtgttgactggcagcaggcaatcaaaggtctgatcttacttttggcagtcgtattagatatctacaataagaaacgtaaaatctcataaggcggtagacaacatgacggaacaaaaagaaaaacggatcttgctgatttgtacagctggtattacttcaggtctgttggtaaaaaatattcaaacagccgcagacgagcagaacattcccattcgcgtgtattctgctccagcgattatcgctgaacaggccatccaaaatcaacaaatcgatggtttgatgatcggcccccaatcagaatacgaagtgaaccgtttgaaggattttttgaactacaaagcggtgagctacaagatgatcaagaaggaagattacgaaacgttagatggagaggcggtgcttaaggaaatactcgcgagctttatgtaattaatacaagaaaaagaccatttgattgacatgttcaagtaacaaatggaatagtttcaataataactaagattaaggcactgtctgcatatagacagtgccttaaatgtatttatcttattcaacatcaaccgcttgacgtcgtatctctttaactactaatgatgcatcatctaaaacatagatgccctgcacatctcctgtatttagagcagcgattgcttcattcgaaaaatgtagcgagctagtttcaaagcttagaacttttttaccatcagtgacgatgaatgtcttcgttgctggttgattgatcagttcaaacttcgttggcaatgactcaaggcttcccaaatcttcctcaacaattaaatcttctactttttgagaacgagatacaataaattttccttcttcttctcgaactaaaagagcagcgaaatgggaatcgttgatcatgctgatgataccgatctttccatgattgcaagtagtggatttttcgaccttaacagtgaatgactctgctttttcagtttgtctgactccgagaaatgaaggtgttgtgctttgttcaattgttgttgagcagccttttaaagttaatgtagagtgttgcaaaagaagattttccttaaggctcccccgtaaactaagccattcaggatttaaagtaggctgattaaattcatcaacaaaaggtaagattttttgctcatttacaagtaccttttgatgtttcggaaactgactcatatcgaccacttcactagggatgccctgattaatttccggccattccttctcccaattgactggataaagcagggtttctcgtcccatattggtaatttgcttgaaatcaattgtagatgggcgcgttcctaaacaggtcaaccaccaatttccttttgtatcttggaagagatcggcgtgaccaatattttgtaaaggttcatttgcgcgatcacgatttgtaaaaattggattgatggttgagtgatcctcaaaaggtccccaaagattgtccgacttgaacatcgtaatcatatgtcccacgcctgttccgccttcagcaaccaataggtaataagtgttttatcgcttaattatatgagggccttcaacatcgcgaccacctgttcccagactgattacttctggcccgcgtaaaatggctccagttgtaagctcaatttccgcttgttgaatggctttggttcccttatcatcgatataacctgtgaaggtgacataggttcgtccattttcatgataaagatcaggatcaattcccataatgtcgatttctatccgttgttgttcccaaagaatttctccattctcattcaatttgcctttgataataaagtttttgaactccgcaaaattagtagtgatcacatagaaatgatcattgaaaaaacgaatacaaaccgcgaagattccttcattagatttcgcctttgataggtccgcttgttccgttgttacgacgattccaggaagttttgtccagtttaataaatctgtacttttacttaaggcgatccccgggtagtactcaaaggtactgttgaccatataataggtatctttcactaaaacaatactcggatcaggatacataccgcgtagaatggggttttgataagtttccaccatataagacactccttttctattgatgataggctgtacgaactgcagcaaacgttagttcagcggtagttgaaaggtgaagatccgctgtcttcagatcactatttgttcctattgctacagagaaagcgccactttctttgatggctttaagtccagcaatcgaatcttcaataccgatgcattctgaaggctgaagattcaatgactgagccgcagcgatgaaaatatctggtgcgggtttgccattttccactttacttggatcgacgatggcgtcaaatttctctgccaatgttaacttttctaaaataagcggtccgtttaagctagaagaggctaaagcaagctttaccttctgctgtttcagttcagagatgaatgttgcaacccctggcaagatattgtcaggggatagctgcttaagcgactccttatactgttcatttttttcaaacaaaagctgttgaaacatattctcagagacagaaacctctaaatagtttaagatcacctttaaagaatctgctcgacttacgcctttcgtcttttcttccaagtcactaggaagctttgcagaaaagtaattgtctgtaagttttttccaagcttcaaaatgcagggtagaggtgtcggcgatgaccccatctaaatcaaataatgcacctttaaacaaatgagatttcctcccgttcacttagaataggcgttgatgctagtgcgtcattgatttttgccagattctctgatgtgatttgaataaaaggtaagagtgtattcaatttgctcaaggacatagttcctaaaccgcccttaatggctgctggatctgctctgaaaaaatctaacacaggatcaatcgcatcaattttttgaaccaacagttcatctgccataatttcggctgcaggtgtttcgctattataatattctacgtaactttctctcggaacataggcgatttcataggtgccgcaggtaagtgagaagcgaccgttatttttttcctgattgttgactgttaccggaccattttctcctcgtggtaaatcgacatgtacggtcgttccaaaaggcacagtcaagttgagcttaatagtgtgctcgctgtccgcttcgatttgataacttacagcgaaagttccgtatggtgtatcgaaatgtccattaacttgttttaagcgataatcaaatagcggcgaaaagttgatttcctgatagccagggtgagctggtttaattcctagaagatagctataggcccattccataattgcaccaaagctataatgatttaatgaattcattccttctgggttcatggaaccagaaggaagaacagagttccagcgttcccagacagttgtcgcgccaagatttactgcatagagccagcttggaaaatcttctaaaaggaaaattttcgtggctagtttatgatagccataattagataaaacctgacagatgaagggagtaccgacaaacccggttttaagatggttattgtcctttttcaagcgggttactaaatccttagcgactcgcgaacgttgtgattgaggaaccaactcaaaatatagcgcgattgcataagccgtctgagtatcaattgctaaacggccatttgcagtaatatattccttaacaatagcctctttgattcgttgagcttgctcacgataataggtcgcatcattaggaaacttcaaaatttcagccgtttgagcaatgatgtcattcgaataatagtagtagacagaggcaataaaatcttcttcagtttttccagtcggtagcgcgggattttctccatcaagagcgagccaatcgccaaattgaaaggttccagtccataaatcactgcttttactgtttttttgaatccatgctacccaatccttcattgctgtatagttttgacgtaaaatcgctgaatcaccataaatctgatacatgttccaaggaatgattgttgctgcatccccccaaaccgcagcgccgccatcagaattccccattgcaggagcatacatcggaaccataccatcatgcaattgttgctcgatagcgatgtcttttgcatattttttaaagaatggaaaaacgttcatattcaaagcagctgttttagaaaacacttcggcatcgcctgtccagccaagtcgttcgtcccgctgcgggcaatcagtcggaatatctaagaagttacttttttgtccccacagaatattttgaaaaagccgattaacctttgaattagtggttttgatttccccagtggttgccatttcagaatgaaggaccgccgcttgataatcttcttttctcagtgcttgagtgtttccttcgacttttacataacgatagccgtagaaagtgaaatgggggcgaacccatttttcttcaccgtcagaaatatagacaaaagaggctcttgcttcacgtaaattttcgcgataaaagttaccctcctgtaggatttctcccatttgaaaaacaagttttgtgcctttgggttcgcggttgtaaaattccatccaaccagtctgattttgaccaaaatcaaggacctgttcacctgccggagtttcaaggatttcttgaataggcaatcgttccataatttttatcggcagactcaatcggtcttgaagtagtgccttattctgatctagtaagatcacggactgccaatcggaaggggttaatgtatcatttaagtcttctccataataaatctctgatttagttacttttccgctggttgttacccatgagctatcagtggaaatgatctctgtttgaccatcttcatacgtcacgtggaattctccaatgacacattgctggtcgccgtaaatgtttttcattccgccatcgaagcctaaagttcctttataccagccgtcaccagtagtgaagagcagctcatgatccgctgctttttggaaggctgctgtgacatcgtaggtttggacttggatccattgatcgtatgccgtaacccctggcgttaaatactcatcaccaactttttcaccattaatatatgcttcataaatccccaatccagtagcgtataaacgcgcttttgctacttgagacttcacgctgatctttttttgaaaaagtgtattttgaatggacttatctggatgagcaatccagtctgcttggaaagattcatccatttttccagtttcaaaaaagctttctttggtaaacagctcatgatttgtgtctcgaatcgcaatttctacgtggtaacgagtacgtggaatcagtgtcaacggaacatcgaaatagttatttttgaatggttcctgcttgctttggtaaacgggggcttcataattatctgtccagatcgttaattgcttcgtaatttctgtgaactgttctgcttccactgtaaactcaattcgcagatcatctaactgaaagccaataggttctgtcatatgattgattaaaatttttgaaattctcatttcttcacactcctaatttataatttagcggaaaagtcaccgcaaaatggatcgatcgggctgatgccttcaaagtcttcttcaccagtcatttttctaagtactgcttcaatgctttctttatttccagtatacgtattgatataggtagatactgcaggaatatcaaataaatggtaaggattcgctgttgagataaagatcgtcggaatagccttcataaaccaaggagcgtccgccgccattaaatgaatccaatcgaggcgagtggtggtttgattgctagctgtttcgatatttgcaatatagagtgctagatcaaatttttccttcatttcagccaggccttcttcaaaaatctcatgaaaatctagccgctttcggtcaaacagagtcactcgaaagcccagtgtctccagctgtttttgaaaaagatcggaaacttggccaccctctttaaaacctccgtcatctgagtcacctaaaacaaccaatcgaattcgtggataacgttttactgtcaaaggcaaaaggtgatcccgatctttgactaaagtaacggcctttttagctgttgcggctgctttttttgcatgttcagcagtatttaaattcaacgtttctggcatcgtcgcttcaaataaaccatgtaccatttttgtcgcgagaattcgtaaaacagcttcattgattcgtgccagcttcaatgtgccattttcaaccgcttttttgataaacgtataatcctcatcaatgtttttattaaaaaggatcatatcgattccggcattaattgttgcaggtaacagttcttctcgcggaagaatcgaattgtaaccaatcattggtgtagcatcggtaatcgtcaagccgttaaatccaagttcgtcacgtaatagcccatcaattagccgttttgaagccgatgcaggtcttaattctgaatcctttatatccggcgacagctgtttctcccaagccggtagcatgatatgtccgatcatgatactgctaattccttgatcaataaaggtttggtagatttgcccataagagttcatccaatcatcagcggacagggagttgatggtgcttaacaaatgctgatctcgttcgtcgacgccgtcacccggaaagtgtttgataacaggcaagatgccattcttttccaaccccttaatttgagccgaggccatttggatcacacgctttggatcgctgccgaaggttcgagtattggtgatcggattccgaaaattcagatcgatatcaacaatcggagaaaaggacatgttgcagcctacttgagcggcttcatttccagcgacatttcctaattcgtaagcttgttcaggatcatctgtcgcagctatttgcagcggcattccgaaccaggttccttctgtaataatcccatttccgccagattccaaattcgccgaaaagaatagagggatatcgctggctgcctgagcagttgttaattgtcgtttgatcttttccgctgaggcgggacgatacatcataccgccagggcgataagttttgataaactctttaatgtctacttgatcctcgtcctgtccaatgacaaaaaagagctggccaattttttcatccaaagtcataatttcaactttgctttgcaactgttgaatttgttcttctgctaagtaataaggtttttttgataaatctaacatgctttttgcgcctccaatgatttaaagatacttgttcgcgctttcattttagtctggagaaattgtataaaccattgcgaaaaaacagcttaagtgtgtccatttcattgctcctttcatttatcgaaaattgagtcttgcttgaatggtttattcatgagatagtttaggcgaagtaatgaaagaatatcattcaaaaaaacaacttaaagattaaaatcctataattactcgacttattacacagacagatagtagctttttgaggggagctgaaggaatggaagaaggagttttaaccatattacaggagaaaaatcatcctcgtaattggaatgagttgggttcagaaatgagaccaaaacaaacaggagtgttgaaaaacgagcctatttatgaattttttcatacgttggacgactcattagaggtaaatccgcaatcaatcgctatttcggtacagccagtgagctccttcattccatttcatgtccataattatgtggagataatcgtacctcttgtaggtgaatgtaccattattacgaaaaacgatgagttaaagctgaagcaaaatgacttgatcatcattggcaaccatacgattcaccgtgtagaaccgattgaaaccgatgctatcgtagtcaatctgaccctaaaggacacggctttcaatttaaacgattatcattttatgtatgaggatcgagcaaccaaaaaagtctcctccttgcttttttcactgctctcaaatgaaacgcagggggagaatatctatcgcttgtttcggacgcatcaagatacaaagattcatttgctgttagaggacattatccaggaatactattatccagacacccaatcgaatcagatcatccgattagaattattaacactcttcggtcggttgattcgttcagctgctaatgaacaaacagtgattgctggagaagatgatggatcagttaatttattatcgttacttttatatattgaaaagaattatgcgcacattacgttagaggaaatggctcagcactttggcttcaatccgaattatttatcttcttatttgaaaaaacacaccggattaacctttatcaaattggttcatctgcaacgggtgaatgttgcggcagagtacttaacgtataccaatgcgccgattgaacagattgccctaaaggtagggtatgaaaatccctcctatttttataaaatgtttcgaaaacatttaaagattttaccaactgaatatcgtgaaaagcattctttcaatgctaaaaaaaccgattgagtctcaatcggtttttttagagcttaaatttttggcgatactgattgggtgaacatccagtttgctttttaaagaaatggtagaaataagcttcactggaaaagcctagtcgttctgcaataagctgaacagtcaaatcagtcgtatttaatagctgttgagctttctgagttcggatcatttgagcataattggccagagtcatttttgtttgccgttttaagagtcgattcaggtattcaggattgtagtgcagtgtggcttcgatttcttttcgagaaatattaccaaagcggctttcaatcaaatgaatcacgcgattaactagataatcttctttggataaatccagatcaatccgctgaagtgaaaattggttggtgttttccaatgcatccaacaggcgtaaaatcaatcctcgctgaaaataagcacgaccgattttggaggtagctacctctagctgcaaagaatcaatgatgacatgaaagccttcgctttgataaggcaagcagggagtaaactcaatatagctgcgtttccactgcgcatcagattgaagattttgctgcaaaaattgaaagatcggaccttcgccagaatcaatagacagtaattcctgaagcagcgcaggcgataaatttagaaagacgacattgcagccatctgaaagaatctcccgatgcagaatctgagtattcaatagacagccttctcctacttgaaaaatgtattccttctcctcaatataatttgttagttctccctttaaaacatacattaattcaaagttttgatttttatgcaacgcttgatattcttcattttcaaaggcgatgattttaccatcctgcactttggtataaagaattttttcaccgattttttgcttatagaagatggcgatcggtgaatgggttctgatttgcggaatgtcagcatcgccagaatggagctcagaaaaaggatcttttgccataaaacacctccgaaaggtcgggaaattgtagtaaacggtttcttgaagtcggtatttttcattatatcacagagacaaacgaactagaataatggatatcagaggaggaaaggcagatgcgagaaaagaaaaaaataaatcagcaatggctgtttcattatggagaaatcggtatgcctaaaaaaacagcaaaaaaagcccatgcattaggcggattgaccgccccactaaaggaagagaaaggagagtcggtagcatacggtgcaggaggcgagcattttttaaaactgattgctcaaggagatgagattcagggattaaaaaatttggctggaaccgatcttgattctggaatagatcaaaattggcaaactattaccattccccatgactggaaaatcagccaatcctataaacaagctccagaattacttatgtctggatcaaaggaagatggagttggttattatcggaaaactttttccttaaatgatgagttgatgaatcaaaagcgcgttattctacatttcgatggagtgatgcgttcagcagatgtttggctaaatggtgcctatctaggtcaaaacactagtggatacacaagtttttcttatgatatctctgaggtggccagatatggtaatgaaggagttaatgtactgctggtaagagtggatacaacaacaggagcagaaggctggtggtatgaaggcgctggtatttatcgtgacgtttggttagagtttgtaccattgatcgcttttgatagagaaaatgcttacgtctatacacaggagcttcaagaaacacaagcagttatgggagctgaggtttgtatcgagaattactcacagaagatagtcgaggtctcgccagtgatcaggatcaatgaacagctgatcacgttaggaaaacaaacgctccagccctttgaaaagcgtgttcttaaagaaacatttattttttctactccaataccctggtcgcctgaaaatcctcatttatatgaatcagtttttcaaatggaaacggatgagtgccgtaaaagctttggcattcgaacgttcgcttatgattcacaaggtttttatttaaatgggaatttgtatgaattgcggggtgtttgcgagcatcaagattttgctggagtaggtgtagcactgaatcaggatatcgttgattataaaattaaaacgatgaaggaaatgggtgtcaatgcctggcgtagtgctcatcattttgcttctgaggaacttatggaggcttgcgatcgttttggcattcttttaatgaatgagaatcggttgttagagagcacaccttggcgaattgctgatttggaaaaaatggttcgaaaaagcaggatgcatgcttcgattgcgttttggtcagtagcgaatgaagaggtcatcgggaataccaatctcggaagccgcatcgcttataaattagttcggtgtatcaaacaaaataactatgaatgtctagttgtttcagcagaactactaaatcctgatggtatagttaatgaaagctatctagcaaattatgacgtgcttggagtaaactatccagaagcggatgcaatgggaccaggcgcgattaaaatcaaagagcagtatccagagcttgcgatcatgagtacggaaagtgcctcctatttttctacacgaggaatttacaaagataatgaagaaaattgtcaatgctccaatttgggttcgctattttcaatgattttacctggaaaacgccaacctggagatcccggagcgggagggaccgcaacacctgaaaaagttttaaattatttgactaagcaccagtatatggggggagtttttctttggacggcgtttgattactatggcgaaccttctccttttggttggccagctatttcttctcaattcggtatcgctgatttgtgcggctttcctaaggattattattactattatcaagcgaattggaaaaaagaacctgtgcttcatatcctgcctcattggaatgaagaaggcctcgaaatcaatacggataggatgattgctgttcgtgtcttcagtaatgccgatgaagttgagatttttgtcaatggaataagttttggtaagaaaattattattggttgtatcgctaattgggaaattccgtatcaagctggggaattaaaggctgtagcctatgatggaaaccaactcattaccgaagccaagcatcaaaccagttcaacgattcacgcgattcgaagtaaaaggatttttgaaggaaaagaatacagtctttttgccctagaagcagtcgatgatcatcaacgatttgttcctacagcaaataatcaggtaacaatttctgtcgaaaatggagaaatcgtcggattagcaaatggaaatccaacgaatcaagctgcgtacagtctagatcatgttcgattgttccaaggaaaagcattggctatcgttcgaacaagtgaagcaagtgttcaaatcaaaggaatcattcaaaaataaagtcaaggcagaaaaagtatctatgaaaagaccacaaagcgcatgaattttgaatatggctgtagtactttttctagcctatactttaactatcatttgaaagcggaaacaaaaaaatataaaggagcgcaattattatgaataagaaaaaattatctctagccttaggtattttaagtatgaatcttttgttgatgtcaggctcggttgtgggtgcggcaattgccgcaatttcaaaatcattccctcaagaaccaatttctaaggtacaaatgcttagttccattcctcagcttggtcagttgatagccacgttactttttacttggttaacctataaaatgaccagaaaaaatattggggtcgtttcagtagccatcgtagcagttagtggcttattgccagttttttataacagcagtctgaatattatcttggcatgtatgatcgctctaggttttgggttaggattaatcagtaatgttggaccagttttactacaagaacattttgatggtgaagagcgtgcggcggtcatgggttgggcggtaggctttaacaatttaggaatgatgggctttactgcgatcggcggtgtgttaggcagtacgaattggcaaaatctattctgggtttatggggcagcgattcttattttagtcgttgtgttagttttagtgcccaaagatcgaaaattatctgaagaggaaatctctaaccagcgtccaatcagttttggtaaaacggtaaaaagcttgaatggctatgtttatgtgatgctgatcgtgacttttgtgacttcgctttgcttaatgatctttatggcaaatcaatcaattctgctagcttcaaaaggcaacggtacagcgtatacagcaatggtcacagcattaggaaatgtcggaggaatttgtaccgcttttggattgaaatatatccgcaaaattactaaaacagatacgatggcctggggctttgtggctttcgctttatcttatatttgtatcgtctttttcaataatcccgtgttgcatattgctggaaatatgttctcgggaatggggatcgttatggttaatgcgacgattccatttgaattatccattttagctaatcatcaacaatttccggtcgctattgcgatgaatacactgatttcttctttagccggtttcgcagcaccgatgctgcttgcggcaaccaagatttcagctggagcgaactcctatcttgccgggattgccattagcggcttaatggctgtcgtattattgattactcgcttaggaaaccgcatcgaaaaaaagtccggtgaggcaacagttgccaatgcacaaaatgaaggggtgcaggaagcctaaagatatctattctcaacataaatataaggatgaacagactttattcgtaaggatgggtctgttttttttgtagttaaaatgctcatcaatagccgagaaagagcgtaaaacagattttgagaaaacagatggaagcgatctaagcagcaaaagcagggaatatgagtcaagcagaggcaaagattcacgatgccgagcaagccatcgttgaagcgcatcattctcaaacagacatgttaaagaaagaagctcaaggagaaaaaacagagatcacattgttgactgtacatagtcaggatcatttaatgacctctattgctttttgtgatttggctaaagaggttattggactgtatagttacttacagaaaaattaaaaaattttgattagtaaattattttttactgagcaaactagtttgaaaagacatgtagggatttatcatagaatcacatgtcttttttctttagccattttaggagatatgaagcaaattaagcttgaaacggatttttttcaaaatagaagccagataccacagtaaatctttcacttctagttttctagttaaatgtcatagtaaagaagagagtaaaaagtagatcaagttctttatatttcggtaaaaactttgaagcttatatctacaatttttccactcatacacttttcttgatagtaatggaagagcagtcacagtattatttataggaaagttactacgaacaaatttttccccaaaaaatcattgacattctatactaaaaattctaaaatgtacctatcgatataacgttatataacgttatataaaaaggaggatttttatgaacgtgaaaaaagtagttactgaaattattaagaagaatgggggagagctgtcagggatttattttgtcgcttgcggagggtctttagtagatatgtatgtggcggattatttcatgaaagccgaaactttgaaaacgaatacagggttatatacggcaaatgaatttgtccatgtagttcccaaacggttagatgaaaacgctgtggttattctgtgctcccatggcggaaatacgaaagaaaccgtcacagcaggtgaagttgcacaaaaaagaggtgcaattacgatcggtttaacgcataataaaaatgctgaattattgaaggtttcagactacagcttcctttacgaatggggagatggcgcgaaggtactaaataatccaatggcgattattttagacttaactgtttcattagtcaatgcggcagaaggctatgaagcttatgagaagtttcgcgaaggaatgacgattattgacactgttgttgataacgcaaaaaaacaggtccaggatcggatcaaagtttttgctgacaaatatcaagatgaaagaatgtactatatcctgggcagcggcccaagctatgggcatgcttatggtttttcaatttgttcattgatggagatgcagtggttagattcgacttccgtacattccggtgagttcttccatgggccgtttgaggtaactgacagagatacgatgtttatcctgttgatgagtcaagggcgtacgcgagcactggacgagcgagcaaaagtctttcttgacaagtacgccaacaaggtggaagttgtagatgcaaaagagttaggcttagatttgattccggatgaggtctcagagttctttaatccaattttgttttatagtgtattatcggaataccgttctgctttagcagataatcgtaatcatgatttagatgttcgacgttatatgggaaaagttgactactaggaggaataaacatgaaggttttaggtttaggagataatgttgttgataaatatgtaaaccttgcaatcatgtatcctgggggaaatgctctaaattttgctgtctttgccaaaaaacttggtcaagacagcagctttatgggtgtttttggttcggatgcggaaggaaagcacgtggtatcagccgttaaagacttaagcattgactatagtcattcgcggtttgaaacaggtgaaaatggttgtgcacgagtagagatcaaagaaggggaccgcatttttttaggaagtaatgaaggcggtgtcacacgggagcatccgattgaattgacacaagaggatcgcaagtatttgactcaattcgaattgatccatatggggttatacagtcacgtaaaccatctactaaatgagctatgtgattttccagcaaatgtttcttatgacttttcagatgactttaccgaagaagaaattttacgcgcgatcgacaagatcgattttggtttcttttccgtcagtcagttaacggatcaagaaacgaaagattttttgaaaaaatatttttcttctcgtaatgaagttttggttgctaccagaggggataaagcgactatcgcctatgatggtcaggagtattatgaagtggtgccggtcttaagagagcccgtggatacaatggctgctggtgattccttcttaaccgcatttttgattcactacctaaacggaaacgacatttctactgcgatgaaacgcggcaatgaatttgctggtgaatcctgcatgatcaaaggttcttttggctatggagtttcttacgagtagcttgttttatcaaaaggcatttgatactctaactaggagatacaatccagaaaagcgaggatcagtctatgttagatgcagatgcacaattaccattatatgaacaattaaaagaagtgattaaaagtaaaattcgagatggagaatacaaggagaatgaaaagattccgcctgagccagaattaactgaagcctattcagttagtcggattactgtccgcagggcaattcaggacttggtaaaagaaggctatttgatcaaaaagcaagggaaagggacatttgtaaaccagcataaggttttccgtaaaattgagtatgtgacaggctttactgaaagctgtctggcgaatggatttacacctactagtcagcttttggagaggaagataatttctgctactcctgaacttgcggaaaagctgcagctaactgttggggatgaagtgatttacactcagcgtaaacgaatggcggatggcatgccaattttgctggaaaataattacttcgacaaaaaacgatttgaatcgctattgactgcagatttaactggctctctttatcaacttttggcaaaacaagaggtattagcgatcaatccaggtgagacgacacttgagttagcgattgctgatgaccaattagcgaaaataatggaagtaggaattggtaccccattcttttatgtgaataccttgataaatgatcaaaatcaacagcctattcatttaggataccaatactatctaggtgaggtctacaagttcagcctataattctccaataacaggagtggacgacatgcgaaaaattcttcgttctaattacattttcgatggagaaaactctcccttcaaaggctatatcgcttttagcggagagaaaattgaagaaataaagaaagattggtcatatcagcatttgcttgatgatcaaacaacagtacttgaatacgatgactatttcatcatgccaggattgcacgataatcatgtgttttttagcggttatttaagcatgcacgcggggattgacttagcagaaacaagctcagaactagaggctttacaaaaaattaaagatgtacttgatccaaaaaaaactgagcccatctacgcgtatggctggtcaccgcaggtttggggaggattgcctactcaagatttactggaacagcttgattatcagggtcccattacggcaattgcctgtgatcgttcttattgctggatgaatcggcaggcgaaagagcgttatggcttcaatgaaatagaaacaagtgcggaaagccgttttcgtttgattaaagagatgctatgcaatcaagaactagtccagaaagtttatcaagaatttgaacaattattgctttcaagaggtgtggtgtcgatcaaagaaattgtttttgatgatgctgaattcttgaagcaaatagaagcacgaaaattggctacacacttttatcttcaatccgtagagaagccaattgatgtgcgactagttgaacaatataaagaagaaccatttcgtgcaaagataacctttggtggaatcaagattatggtcgatggggtggttgcagatgaaactggagatattctaggaacatattcttctggtaaaaaaggccctgagatcgattatcaagtgattgctgatgaagtagaaagatggaataaattggctgttccatgctgtttaactacagaaggggatcaagcgggattagaggctgccaaaattcttaactattatggaaagcgcttaccaagcggagtgtataattctataagtgatctagagatgatcacaaaggaaatggtgagagagatggcggaaggaaaaatcattgctgagatttatccgcagatactggggttaaattcctcctatcaggaggcctacatgcctgaagttattagaaatgagaagaaggcctttttcaattatcaattattgcgagaagctggtgtttcaataactagcggaactgacttaccgctttttatcaccaatttacctgaatcaatcgttcgagcctgtttccggcgtttcccgcatggaaatgaaacgtggcaaccagaaaatgggctgacaataatagaattattgcaaagcttcacaaaaaatggatttgcggctaatggtaaggaaagttacggtgttcttcaagtagggaaatcagcgacatttgccattttcgatcgtgatttgacacaaactgtctgtgaggaagttgctgactctaggaccatcatgacttatttggatggtgtaaaggtttatgaaaaagtgtaaattttgatataacgttatgatacgatataaggagtgttaaactagatggaacttaagaaaaagaagtttgtttttccccatagctataccttgatcttccttttgattattgttgcagcactgttaacatggttcattcccagtggtcagtttaaaacaatcatagaaacgattaatgggatggaaaaaacaacggttgttccaggaacctatcatcaaattgataaggccggctatggacaagggatcggagccatattagaagctccagctgctggtgtgatcaatgcagtagaagtggtggcgtttgtcttaattgttggtggcgcttttggaattattttaaaaacaggagcggtggatcggggattatttaccttagctcaatctttgggtgataaagggatcttggtgattccactttccatgatcctatttagcttaggtggttcgacttttggtatgagtgaagaagttatcccgctattcgccgtttttgtctcactaatgttttcactaggatttgattctatgacggcgattttgattctctttttaggtactcaggcgggttatattggttcgactatcaatcccttcaacgttctaattgcccaaggagtagcagatgtccacggaaatccactgttgatctatcgagtaatttgttgggcagtcataacagcgatctcgatcatttttacgatgcattatgcgaaaaaggttaagacaaatcctgaatcttccattgtctataagaatgatcaaagagtgaagcacaaatttcaaaactttgaggttgataagccttttagtatgagtgataagtggatcattggtggatttattgttggattgatgattatgatctgggggattatttctcagggctggtatatggtcgaaatttctgcattgtttgtaggaataggcttgtatgcaggaattgtagctagatttaatcaaaagcaaattgcagaagcttttgttgaaggttgtgctgactttgcctatgcggcagtaatcattggtcttgctcgtggtgtattagtcattttggaaaacggaatgatcatagacacgatcttgaactgtttagccagtctattaggaggcttgccgaaaatcatgttttcagctattttattagttgctcaagtgattgtgactttctttgtaccctcctcatctggcgctgcagcgttaacgatgccagttatggcaccacttgctgatttggttcatattaatcgagatgttgtcgttttaagtaatcagtttggtaatggtttaatgaatttaatttcaccaactggtggggttttgttagcgggattagcgattgctgaaatcaacttctctaaatggttaaaggttggctcgaaaatttttgtgattttattcgttgcttcagctatcctgttgtatatagctacattgttatagaaaatctagaataatcataaaacatttcaagtgatatactcattcaattagtcccttacgaaagtaaaatagtaagggaccttttgtttttagttaattttgttggaacttttatcaatatgcagaaagcaattttgtcctatttagtattacttatttgttttgtcttcaaatagcagttatagattgtctcaatagtgtttattttataggagaaatctgttattttgaatatagaagacaatgcttttttatttgttcagaatggttttttagtattttttaatacttgggaaatatatttgatgagtagccatgaagaatcaattaaaaagaataatcgacttttaaaacttaatatccttcaatcaacaactaggaaaaaggtgaaattcctttacagtccctttctactgtaatgcgcaatgcaaagtcagacactagtgtggattgattcgaacaagcaatatcagggtcgtttgtttcatttgttttttaggacacccatgctttccgggtgtctttttatttaataaaatcaagggggatatggaaatgaagaaaagaaatttattttttgcactttttgtaagtttaatgctgtttagcggatgtacaacgaaacaagcagagtctacagatagcagtgtggcggaagaaaaagtgtcaagcagcgaaagatcagaagcaaaagcaagtatcattttattagatggtgacaaagaattatctaaaaaggacgtttcattcaaggagggtcaaagcttatttgacgtcttaaaagagaattactcagtagaagatgatgatgggatgattacttcacttgacggacattcacaggatgctaaaaataataagtattgggtttttacaattaatgatgaacaagtaaattcaggagcaaaggacgttacgctgaaaaaagacgatcgagtggtgttcaagcttgaacaattctagtcgaactgtttactccgtattttcactaggggtaaaggaattaagcctgctatctatgcttgtcgcattgtgtgtcgtcagtcgtacgttttttcaattcattgtcaatgtacagccggtcacggcgatattactaattatcactatttattggggaacctatcaaggattattagtcagcttgctttctattctcattacaaatttttatatggggatgggagtatggacaattgctcaagtagtgacctactttttaattattttattgacaggtttacttaaaaaagttcctcaatttaaaaagagcattttattacaagcagtttatgcaggaatcacaggaatactgtttggttttttcatatcggcagttcaagcgccatttttaggcatttcagcgtttttaccttattatttagctggaattccggttgatacaatgcatgctattggaaatgttgttttctatgtactattaacacctattttgaaaaaattattaacacaaacgattcaaaaatggcatagagtgaataacaaatgaatgagttaactacaaaaggataaatctatgatgattcatcagcataggtttatcctttttacattttagagacttgtactggatgagcaagattcttactgtataatcgtgagctaaatgatgtctttatctatagggagtgagctacaatgtaagtgtatcaaataaattatacaggagggatttttgatgaaggttattgttttaggatcttcacacggcggctatgaagcagtcgaagagttactgttgactcatcccaaagcggaagtgcaatggtacgaaaaaggtgactttatctcatttatgggctgaggcacgcaaatgtatctcgaaggagtcgtgaaagacgtaaattcaattcgttacatgacagccgaagagatggaacaacgcggggttcgcgtttttaccaatactgaaattaccaaagtaatacctgacaagcatgaagttgaagtgttggatcacgttagcggtcaaacacgtaaggaaacctatgataaattgattttaagcccgggggcaaatccatttattttgccggttcctggtcatgagttgcagaatatagaaaccatgcgtggtcgtcaagatacgattgatttgaagcttcattctgttgatcccgatattcaaaatgtcgtggttgtcggtggcggatatatcggaatagaagcggcagaagcctttgtgaaggctggaaaaaatgtaacgctggtggatattatcactcgaccattaggactctatcttgatcaagaatttaccgatattttagaaaaagaaatgacgaataatggtatgaatttagcaatggaagaaaaggtcgttgaatttgtcggtaaggatggaaaagtcagcaaagttgtgaccgataagggagaatacccagctgagttagttgtaatgtctgctggtgttagaccgaataccgcttggttacaaggggctgtggatatgcattcaaatggcatgatcaaaaccgatgagtacatgcgaacaagcgctgaggatgtttttgcggtgggagatgcgactttgattcaatacaatccaggtcaaacaacagtcaatattgctcttgcaaccaatgcacgtcgtcaaggtcgctatgcagtgaaaaacttagaggaagcaaactatccattccctggtgtgcagggctcatcggccttgcgtgtatttgattacaagttcgcatcaactggattgaatgatcaaatggcggatcgcttgaagatcgagacaaaatctgtcttactagatcaagacaccctgatggactttgtgccagcaaatatgaaagaccggatgctgtttaaattggtttacgatccaaagactcatgcgattctaggtgcacaaattatgtctaaaaaagacttaactgcaaacatcaatgcgatttcgatcgcaatccaaacaaaatttacgatcgagcagttagcttatgcggatttcttcttccaaccagagtttgatacgccttggaacttacttaatatggcgggcttaaaagctcttcatcaggaaaatgaatcgtaatgtacaggtatttttttaaatagatgtcctataaaataggtcactgaaaagatgaataatcattttttcagtggctttttttctgcacaagagagaatttcttcaactgtttataactattactcgataaccaaacaagaaaatctatttgcagatggatcaaaacaaaaaacaaatgagagtttgaaaagcagattatcatattttgcttttaagaagaaataaatgattcaaccttcgagtgcgaattacttgtgttttttaaacagatgattttttggttgaataaatcaaacaaacaatgaggattactagggttttatagatgaatcctattaataattattctattttagagttattatatgtgatttttttggatattataaagtcatatttttaagcacttttaaaaaatatattaacaacaaatgatatgtcctgtatcgtaataggtgtagataacagtggatagaaaatatttttcagaaaggtgtttataatatgattaaattatttagctcatctagttgtgcttcttgtagaaaagcaaagacttggttgaagaatcaaggattggagtttgaggaaaggaatatcttgactgaaccattaacgagagatgaaatcaaagaaattttatcgctaacagaaacgggtacagaagacattatttcgacacgttcaaaagtttattcaaaattagatattgattttgatactatcacctttaatgagttggtagcaatcgttgaggaacatcctggtttattaagacgtccaattatcacggatggcttgaggctgcaaatcggcttcaatgaagatgaaattcatcagtttattccacgcgaagttcgaagagtcgcatcgagaagaatgactgagaccttaattcagatggatttagaaaacaaacgttatgcatagacaactgtttttcataaatgagtcaacttaactggcacctgcgactgtaattgttgtgggtgttatcatttcattcttatcttatttgaaatttgagatttctgaattcagtgtagttttaactaaatgagaataataagaagctgattataaagtgataaaataatttttccaatgtaggggagggtagagatgactacaaattttgaagaaaaggcgattaatcgtatgttgaaagctggaattagtttacagcacgtccaattgcaaaagagaaatttctttcaagatacggaaatagaaaattattacgacaaagtagaaaatagtgagaacttaagcaaaaatattcccgtacaaaaaattgtcgcgataaaatcaaactggaccatcgaaggaaaatccgtttatgatttttttatgggaatatcgaatgagggtagagaaagtgagaagattgaggagaacttacgatctttagaagaacatgggctcgaatcccaacaagctttttattcaggacaagttaatcttgagggcactgatcgtataaaatttaaccattatcaggaagatgattgttatattctccaaaatgatgggattcatcgagtagtctctgctaagatgtttaacgctccgattatgtcagggattgttaccacctataagttgaatgaagaaaagaaaaaattatatgacgagtataattctttaaaagatatcctgcgacttacagatattaaaggatttaccctcgatttatttcaagaaaaaaagaatcctaaaaagaaaaatgaatgaagaagccgatcttaccatttagcacaatgctgggctccccgtcaagtggacaatgaaatagaataaaattattttgacgactgtctaccgaatttcggtaggcagtttttatgttttttactttgtttaacctcaactttgctcgactggtctccttcttgaataagcggatttattctattcgcttgtccaagagggagagtgattaagctgccattaataattcttgatgaacttggctcggtgtcttactcttcaaacaccgttgatagcgaccattgttgtaataattcatgtatttttcgatcatttcaacgagactttctctactgataaactttcgccgataatatttttctcgtttaagcattccccagaagccttccattggaccattatcggtacaatgggcgacacgagacatactctgcttcatttttgctttctttagctttgtgcaaaaaactttacttgtatattgaaatccgcgatcgctatgaaatagcgggtgagcggttggttcggcggcgactgcttgatcgaaggtatcaaagactaatttattgtcatttttgtcgctgatgacaaatgaaacaatgcgacgatcggcgagatcaagaatagcgctcaaatagattttcttcacttcggccccttcataatacttgaattcactcacatctgttagccatttttgattcggttgatccgcatagaactttcgattcaaatgatttttcgcaatatgatacggagtcttggatgccttagtgatactattgcctgaatgcttgatggttgattggatttgaagtttgcgacagattcgaagaatacgcttgtcattcacttgaaagccataatcattcacgagatcttcacagattctgcgatatcctttatcgttgtctgcttcataaatataacgaacaaggtcagccaactgttcattaaataccacttcaggcagtttgggattttttaaccaacgataataggccgatcttgtaacatggagcagggtacacatggtgttaattggatagccttttgtctcgtgcagctctttgatcgattggtattcaaacgtatgacgaactaattcaaatcccgcctcctttctaactcgctgactttttttaacaggtcattttccatttcaagcaacttgatccgtcgttcttgttgagccagtttatcgcgcatttcttcttcgggtgttctggcaggtttacttcccgctcgttgccctcgtcgatcttctaagcctttttcccccatctcatcgtatttcaacacccagttccgaacttgttggtaagagacgtggtactgaatcgcagttttcccatagtctcgaccgttgataatacagtcatgcacaattttaactcgttcattcaatgttgtttttctggatttactcattctacttccaccactttctgatttgaagtttctatgagtattatatatctttaaccagtcttctaattgttttttgttacgaagcccgtatttcttggcgacagctcttaagctaccatatgttccagctaaataatcatggaccgcattcagtttcaattctgttgagtatgattgattcctttttgtagggagtaaacctgtgggtccttcattctcataaagagtgatccacctttctatcgtactgctatcgacttgtgcttctttggccaggctgcttatgctagcttcatttcttaaagctctttctacaagagctagccgttcttctgaacttaatttcatttttcctctagacatacaaactccccctatataagccactttatatttcagtgtcctatatagggggagcatatcacaatggcgagatcggcttttttacatataaccctcggcttcttttcttgtcagccagaaatgaatgccgccagtggaatcagcccagcgattggggttgaaattttcagcaactacgtactctccaactcgataaacaaaatttccatccacatatgagacagcttcatcataatcttcgttcgtatacatatccttaattgtcagcaccttagccttatcacagcggcagcaggtatttgtcgcagaggtcctgcgggcatcagcggggatcagtaattgaacgatccgaaaatcaaagcattttttgtagccgatgaatggtccttctgcgggacaataaaggtcaaaaaattttgtccgtttatcatgaatgataccagtcaaatctgcgtgctccaacattgcaaagtagagattcgcaccagaaatatccgctccgcgcaaacggctgttttgaaaatcgattccttgtaaagacgcatctttcagaatggcttctgaaaaatcacaatcaatgcataaacagttgctcaaatttgcgccagtcagatctgcgtttgaaaaatctacttgttcaaaggtcatgtcatgaaaactggcctgttgcagtttacgaaatgagtaatcatgatttttcagcgtagcattcatgaaaatcccgtcctttctcagcggtcgtgtctatcactattctagcatctcctcagattggagactatcgattcaaaccgattcttttataaattgctccaatatacttggatttcttttccatcatcgtgaataaattctctctccaaaacaccgccattttttcgaatggttttggctgaaggggtattctctttgtagcaggcgatcatcactttttcaagtcctaatatttcgcagtattttaaccctaggcgcaaaatttctgtagcatagcctttcccacgttcggtaggccgtacaccaaaaccgatatgtccgccaaattcgcgtagaaattcatttagttcatgacgaatatcaatcgttcctatgattttttgatcattttctcgtatggcaatcaaggtagtcgagacaacccaatcggaagtaaccgtagctttgtcggattgtttagctaaatgagttaaccaggcactataactttccatttctgttagcaatgacgaaccatgtagtgaatcttcgccaaccgaaaaatgttcttctacatatttttgaatagctgcttcatgctctttttgtggttggatcaacttaattttttccatgaacttcacctctttagctttgttgcttgtggttagtgtagcatgattcgacttttcaaagtagtcaatttcatagtgaaaagagtttgaccttcaactgaagttaaatagtagtaaaaagctagctatgaattagtcaagtgaaaaaggaatttcttttatctttaagaaaacacaccaaatagacctccaaaaatcgaatgaaaaatttatttttcggagatatcttcgggaaaatgaacttcgtaaggtttgttttgtgtccaaacggcaaaaatgatattcacgagttttctggcaactgcaccaatggcggttccatgtgactttcctcgttttctcaatttttgataatacaaggaaagggcaggatctttaaatgcggcgacaaaagcagcttgccaaatggctcttctaagataaggagaaccacgcttagaaagtctgtttttggttcctgtaaaatctccagactgatgaacagaggcatccagtccagcaaaagcaaggagctgattggggcgttcaaaacgtttgatatccccgacttctgccatgaggacagcggcagtaatgtcaccaatccctgtaatggtcgtcaaatagttttcttgttttgaaacgatttcttgaatttctgcttcaatgatcttgatttgagaatcaagcaactgaatctgttccaacatgatttgaatctctaacttgaagacatcagaagcaattgaaatgccaaaagaatgtgccgcagcttctttcaatttcatcactttttcttctgagcgagcgattcctaaccgtttctcacttgcggtattgatggtttcaatgagacgttcggcatcaatctcaagaagatcttctggaataggagaatttagtaagacttgcgtggaagaacaaccaaacacatccgaaaaaatctgatcgtattcaggaaagacctgatctaaacaagcaagaatttttctttttaagtcagaacaccgatccactaaaccatagcggaatcgttccagctgtttcaatcggaaaatatcttctgcgggaagttcggttttatcgggcaagtccaatcgaatgacttgggcgatcaataaagcatcaatcgtatcagtttttgttttccgaatgtaaaaatcgcgtaatacatcggactgtattggattgaaaacagtggtatgaaagcctagcttatgcacgaaagtgtagatggacagccagtaatgaccagtggcttccattccgaccatggtgttttctggaagtaacgcgtgtttattgaagaaagcaagcagttgttcactgccaaatttggtattggagatacggatggtttttccgatcgattttccgtgttgatcaatcaatccaacttcatggtgttgcttaccaatatcaataccgagaaaaaacattcaatcagatcctttcaaggatttgtcagatagcggttatcctctctgctcttggacgatatagcctcgttagatattcagaaaccaggttctatctagctcattcatatactgtcgcaagagaagaggcgtcagtctttttgaggaagacaaggcttcaaggaggaaaactacgacctctatctgcttactacaagtttaaaccaaaaagaaggtttaaaggaataaccagtcagaatgtatctgacaatattaatatacgaggagggaacaatcacttcgagcaatttccctcaaaaagcagttaaaaaaagtcttaaacactaaccaaaaagatcgaatccatgcggattcgatccagactgtagacaaagtccattttatggatgatgtctacagtcttttcttttataataaatttatgaaaacgaatgcaaggagtgatagttatgatgtctaaaaacaatacgaatggtagaaatcaatttgcgatgcttacgattgatgatctagttcctcaagatcatctcgttcgaaagattgatgccgcgcttgattttgaatttatttatccaatcgtcgaagccacttactccgatttaggtcgcccaagtatcgatccagtgattctgatcaaattggtgtttattcagtatttattcggtatccgttccatgcgacaaaccattaaggaagtcgataccaatgtcgcttaccgctggtttttaggctattccttcgaggagaaaatcccccatttctcaacttttggaaagaattatgtccgccgatttagagaaacgacggtgtttgaggatatttttgcctatattttagaacaagcagttaaagcaggttttgtaacagaggataatttgtatcttgattctacccacatcaaagctaacgccaataaacataagtttacgaaagaaatgacccatgatgaagcgaaagcctatcaggatgaattagaagatgagatcaatcgtcaacgaatagaggccggaaaacgcccttttactttggacttagaaaaggaagtgaagctgaaagaaagaaaaataagtaaggctgatccggaaagcggctactacgtcaaaggcgaacgagaaaaacaatttgcttattctgcccatacttcatgtgacgacaacggatttattcttagcacaatcatcactcctggaaatattcatgacagtcaagtcgcctttcagctcgtcaaacaatcgaagagactttttcctgaaatcaactgtgttgtcgctgatgctgggtacaagacacctaagtttgttcactttttgactcatttgaatcttcgaccttgtttgccttattcaaggcccaaagggaaaaaagggctattatcaaaaaacgagtttctctatgacgagtattatgattgttacatttgtccgcaagatcaaatgctcgctttttcaacggttactcgagaagggtaccgagaatacaaatccaatccaaaagaatgtgtgaactgtcctctgctaaaccaatgtaccaaaagtaaaaatcatcaacgagtcatcacgagacatgtttggggagatctgatggatgaagtggaacatcttcgcctaacggatctgaataaatcaatttacaaaaaacggaaacaaacgattgaacgaatatttgcggatgcaaaagaaaagcatgggatgcgttggaccaagtatcgaggcttggaaaaagtcgcgacgcatacgatgctagtgtttgctgcaatgaatttaaagaaattagccacctggctatggaaaggcaaggagcctttatttttttgtcctgaatttcgaaagaaatcagataaaaagacgtctcaaactcaaattacgagttcgagacgtcttttgtctacagtctggatcgaatccatgcggattcgatcttttttaatcaatattgaagcctacgacattgtaccaatgacgatcatcataatctatatgatagcggtcataggaaaatccggataacgcatagcctagcatcattaatataataccggcgcctatcagataagtagcaagctttggaattaagtgcttagatttcatacttggaccacctttctttggaaaatgttgcggcgaatgatccgcattaagctgcgatgcatgttcatgaacacagcactaaatttgtaggtcaaccacatgcacaatagaccaaagccaaataggaacatccctgcaccaagctgagtaacacccataaagaatgaatcgaaaagaacaaatggactagtgaaagccgcagcgacaccaccaatgatcgttccgcctgctaaacaagctcctgtaaagggaatacaccagataacgatatcgatacttaaaagtataagaaatgctgcgagtgccaaactgccccataatggaaatcccaggactaacaaagtgatccatagccaattaaatttacgaggaacgtgaacttctgtcggaataccggccgcttcgtaagctagttgcttaggatcgcccaattttttgacagcggctcgttcagagtacccatcctccattaaatccaaaatcatttcatcgtaatattcaatcaagcgatggacttcgctaggtctgacttcataagctaaatgattgctcaattcctttataaattccactcgattcattcttcaacactccttttaatatagttgtgaacggcttctacgtcgttccattcctgtaaaaatttctgaatactagcaaaacctagatctgttaagtggtaatactttctcaaacgtccattatggacttttgaataagtcgatacttttttattcgtttccagccttttcaagattgggtaaagcgtcgattcggtaatctcaagctgtggatggatctccttaacgatttgatagccgtaggaatcaatctccactaatgaggccaaaacacaatactcaatcaaaccttttttcaattgactatccatcaacaacacctctctatacgttatactatacattacatagtatagagggactataggactttaggcgtattttgtaaaaaattaatacaaaaaattgaaatgctaggttaaatgaaagtctcatgggaatagaggttttaacgttcagccgccatcaaaatcaaatgaaccgcagcgatgattccggctaagttaattattactaatgaccaaaagccagtcagctgattattcgggtgcctcctaaaaatgaaatgtataaaaaggtggcaaatgacgaaaatatcaacaacatacagaatagttatattatttaatagaagaaaaaagagtacgagtgcatacagcagaatgtggggcaaggtaaagaccaaataggcagtattttcaggaagatcttttaaaaagataaacatttcccattctttatgacgaatggcatccatttcatgggttagcaacaaacctagttcaagtgcaaaaaaaccatttattaagtttgtcatgattttacctcgttttcatttcttatactttgtctttatcactatagcataaaggtgaccgggaaaaagaaagaaaataaatccaagttatagctcttccaagtatttaaggtaaaataaatgaaacgaaagagcatttagcttcacttatttccgaggctgttagaaagggatgttcaaatgacacatttatttttagttgaagatgatcaggcaatcgccaaaaatttaatgattctgctgcagatggaaggatttattgtgactcatgctgtaaataaaagagaagcattcactttgttgagtaaaaataagtttgacgtagccttagtggatatttcattaccagatggcaatgggtttactgtttgtacagaaatcaaatcgaagcaagcaatacccgtcatatttttaacggcttcagacgatgaagctagtgtggtgactggattggatatgggggcagacgattacgttatcaaaccgtttcgtccgagggaattattagcacgcataagaaatgcgctgagaaaaagcgggcatgggcaaaccacttttgaggtttcaggactttatgtagatatcgcaggtggagtggtacgcaagaacggcaaagaagtttttctgtcggctttagaataccgtcttttgctggtatttgtgaacaatcctaaaaacattctcactcgagaacacttgttggatgaactatgggatgcggcaggagaatttgtaaatgataatactctgaccgtttatatcaaacgtttacgagaaaaaatagaggaagatccgacacatccagagatgattttaacagttcgaggcataggttaccgattaggaggcagtaatgtttagaaatccagaatttcgtaggccttcttggcttttttcagcagtcacggtcattttgacagttgttggcttcagcttgagccagacatcaggtatattagtcttcctttctgcaataatttttgctggaattttctatttttctacaaaggttcgttatcagaaaattgcacaactaactgatcaaattgacttggttttgcataatgaggagcatctgattattgaggagctggaggaaggcgagttgtcgatcttgcaaagtgagatcgctaaaatgactttacgtattcgtgaacaaaatgtagctttgaaaaaggaaaaagagaatctggcggattcattagcggatattgctcatcagctgcgaactcccttgacttcagtcaatctgcttctttcactagcaaaagcaacaccagatgaaaaggagtgtaagaaaaatttacgagaaatagaggagatgcttcagcagatggacagcctaattacggccctattgaaattatcacgtctagatgctggagtcgtagattttaaaaatgttccgatcagcgttgaagaactgatagctacttccctacggccattctcgatatctttggagttacatgatattcaggtagaaacaactatttctccaagtacaacgatccaaggcgatagaatttggctttcagaagctctgcaaaatattctaagaaattgtatcgagagcattggtgaaaaagggaaaatcgaggttcaaggagaggacaatcctttgttcacggaaataactattcatgatagtgggaagggatttgaagagacagagcttcctcggttgtttgaacggttttatcgggggataaatagtagtacgacgggttttgggattggaatgtcattgagtcaatcaatcattcaccgtcaagggggaacaattgtagccagaaatcatccaaatgggggcgcattatttgttattcgttttccaaagtgacgaatctctcacttagaagtcaccgagctgaaaggtaaagcttctattatagaggtgaaccattaggaagggggctcatataatggagctgttgaaaatcgagcatcttagtaaggtttatggaaaaggagagaataaggtcgttgctctaaatgatgtgtcgttgacgattgaaaaaggcgaatttacggcgattattggggcgtctggctcaggaaaatcaactcttctgcatatgatcggcggtgtggatgtgcctacgagtggaaaagtgtatttagatgggcaggatgtgtatgctcaaaataatgagaagttggcaatttttcgccggcgtcaggtcgggctgatttatcaatttcacaatttgattccgacattgaatgtagtggaaaacatcacactgccggttttgatggataagcgcaaggttaaccaagagtggttgagtgaattgttagagcttttaggactgaaccagcgaaaaaatcatttaccaaatcaattgtccggtggtcaacagcagcgggtctcagttgggcgagccttaatgaatgctccagcagttttgttggcggatgagccaacgggtagtttagatagtaaaaatggacatgaaatcatcaaactgttgaaaatgagcaatcgcaaatatggacaaacgttgattgtcgtgacccatgatgaggatattgctttgcaagcggatcggatcattggtatttctgatgggcgtgtgactcgtgatgagaggatgattcaatcatgaacatcttccataaagtaacaatgcaaaatatgttgaaaaatcgtacacgaacactagttacaattattggcgtcattttgtcgactgcgatgattatggcggtcgcaacctttgctatttcgttgcaaaattttatggtgaaaggctctgaacaaaaatatggggattggcatgttgcagttttggatgccccttctggttttgctgaaaaacaaagcaagaataaggatgtatcagaaacgactaaattttccaatattggttacggaaggttatctggtgggaagaatcctaataaaccttatctttttgttgctggcttcaaccaaaagacctttgaaacattaccggtcaagctgctttctgggagattgccgaaaaatagtcatgaggtcgtcattcctgcacacattgctgcaaatggcggagtaaagtatacgattggcgagacgctttcattatcgctgggtgaacgaatgcagggaaggaagcagcttaatcaacatgacggttatgatcacacacagaataatcaagaaagtttaactgaggaaaagaaaaaaagctatacgattgttgggatttgtgagcgcccaggttttgaagagcaaagctctccgggctacaccttgataacatgtgctgataacactgaaaaaataaataccttcagtgtctttgttacactaaaaaatccaagaaaggcgagaagctatgccaatgacatagcaaaaaatcgatcatatagcttaaatgacgatgtcttacgttttctgggagcatctgatgataaggtatttaatctgttattgtattcgatagggacgattttggttgccttgatcatgttgggatcgatcttcttaatttacaattcctttacgatttcattgaatgaacgaatgcaacaatttggaattctttcatctgtgggagcgacaccgaagcagttgaaaaattctgttttgtttgaaggcttatgtatcggggtgttgggtattccgttcgggatcttgttggggattggaagtatcaaactcatcattgcaattgtggcaaaaaacttcagcaatcttctttatggaaatactccgttagttttagtgttttctctaccggtgatgtttgctgccataatgattagtttaatcacgattttgatctcaacttcaattccagcgaaaaaagcggctaatacaccagtgatggaaagtattcgtcaatcgaatgagattaaaattgtctcaaaggatgtgcgaataacgcaattttctaaacgaatttatggcttggaagggacattggctttaaaaaattttaaacggaataagaagcgttatcggacaatcattttttcgctggctttaagcgtggttttgttcgtctcggcacgtgcatttggcagctatttgcaggatatagcaaaacaatcggtggttgatacggattatgacatcgttttttctagctcagaaatgggtgaggatgagttattccgactttacgagaggtttcaaaaggttgagggcattaccagtagctcttaccaagcaattatccagtatgccacccaagtgagaataaatgatttttcttctcactatcagaagctgttaagtccgaaatccactaagaaacaactatttatggatatccaatttattgaggataaagaatacttgaaatttatcaaaagtctgaatttgccggtcgaggaatatacgggcgaaaacggtaaactgatcgcagtggcaaaacagcgagttaagaaggtagatgggaaaaaagagctgattgatttgtttgctaaggatgatttgacattgactgctgcaccagaaatttctggaaaacctgcttgggatcagcagcgaaatattaaggtaacttttgcagatacttatccaatggacaccttgcctagacaatcatccgaaacgaaatcttacgtttttatgctggttgcaccctatcaaatgaaaagccgattttctacaaaggggattactcaagacctcggtttaacttttctgtctaaaaaatctacacggtcaaccactgaaatgaaagaaatcattgaacaggagggaattaccactcaatatgatctttataacgtcaatgaaatctttgaacagaaccgtaatactatttttgtagtgaatatttttagctatgtttttatagcaatgatttcattaatcgcaatcgcaaatgtttttaataccatttcgacaaatattaaactgcgaagaagagaactagcgatgctacgctcagtaggaatgacagatcgagaatttaataaaatgatgatttttgagtgtatcttttatggctcacgttcattgctactaggaattccaatagcgagcattctttcatggctaatctatcaaggtatgacgaaaggcggggcggaaattgctttttattttccctggggaagcctgtggatcagtatcttgggtgtatttctgatcgttgtaattacgatgttttacgctatcgagaaaataaaaaaagaaaatataatcgaagcattacgagatgacctaacctaagagcatcagaatttgatacacttataaaaaaggagtgtgcctagatgacaataagtaattcttttgaaacatttgccaaagaagcaacagaatatcaaaaagcttttaatgaaatgatccattcatggggcgaaatcagtgtattagatgataaaacacagcatttatcgtatctcgcagttttagcagcgacagggaaaactagtggattgccgtttcatgtcatgcttgccaaaaaagcaggagcatcacgagaagaaataatcagtgcaattatggttggcttaccagcagtaggaaatgaagtgatcaatgctttgcccgcagcactggaagcatttgacaaaaattagaaaaactgggatggcaaatgccttcccagttttttatcgaggatcaatttcctttaatgctttttctggaacctgatcacggcgcacttcttcataggtttcaacatgagcgcctttattggtcaatttcaagtagcgatttatttttaactcggagattccattaaattgaatcgttcgtgtttttccgtttttgtccgctgcgagttgttcatagctggctgttccataatcattgacagagtgaggtttagttgttttcacataaagctcacttttaggaactaaaggatttaactggtcaagggtaccagcaacttcgctggaagaattctttgagtaaagcatcgccccaaataaaagaatgaagattcctataataattccaagtaatttttttatcataaattgattgatcgtcctttcaaacttgatacatttagcttatcaagtttttcagatacaaaaatcagacgagggacctatctggaactaacaaaattgtcacaacagtcgaagattgaagaagttcgattgagtgagtatacttaagtaaagaagaaatgtcggtaaaagttcaagtgctgttgcgatggaatacacaattaattaggaggataagatgaagttttttctagacacagcgaatattgaagagattgaacggatcaatcagctcggcttggtagacggtgtcacaacgaatcccacgatcattgcaaaagaggggaaagatttcgaaacggtcatcaaagaaatttgcaaaattgtcagcggaccagtcagcgcagaagttacctcgttggatagcgaaggaatgattaacgaagcatgtgaaatccatcaatgggcagaaaacattgttgtaaaaattccaatgacagaagctggactaaaggctgttcacacgatttcgcaggaagggattaaaaccaacgttaccctgatcttctcagcggctcaaggattgatagctgccaaagcaggcgctacctatgttagtcctttcatcggtcggttagatgatattgcttctgacggcattcagctagtgagtgatttaagagaaatttttgataattatgattttgatacggagatcatcgcagccagcgttcgaaatcttggacacgttgaagcggctgccttagcaggctcagacattgcgacgattcctggaaatctgtttccaaagttatggagccatccattaacaacgaatgggattgcacagtttgaagctgattggcaagcgtatcaggaaaaacaaaattaaaaaaatcagtgagcggaagaatgttgaatttctcgctcactgattttttattattttttacgattgcggcgaatcatgataaacgcgatgattaccaagatgatgacaccggctacagtaagccaggtccttctttcttcaccagtttttggtaagaaaccgcccttatcgtcttttttgtcgttatcgttttttgctggggcgttgttttcagcactttgcgttgttgaagtagttgttgaactctctgtcgttgatgtttcagttgtactagagctggttgccccattacgcacatcatctttttctgcatatcgactgatccaagcgatgatacctgggaagaagtcgccttcagtaccgatcattttttcttggattggtgaaatgtattttaagacattcgtcaattcctgattgctcatttggcgaatcggcatgaaagaactattgctaggatacaatgctgctaaataggcttgcagactgtcaatctgatcgatcatttcaagagcattcgtgtaattactcggattgtaattcataatattttcgattttatcccaagacaggcttttatccttatacaaagcttgcaggatacgtgcatagccaccaacatctaacccgtaagtatcggtaccaattcgatcacaaagtgtcatggcattcaatagctgctgatcggtgtaaccatctacttcactagatgagatgatgcttttcattgattcaccttttaacatttcacgaatcttattagtatcgtgctcgctgccaatcggatcactgcttttctttacgcccgtttctttttcaatttggtcaatcgtatcatctttcgcttgctgaatatcttttacctcactgttttcagtggcactagccgaagttgattctgtagcattttcagagtcgaccgttgcactattttcagcgggagttgtttgctcagttgcagctgctggggtgttgtccgctgcagtagtactttcagtttcggtatttgcactaatggggaagagaatgaataacgataaagcaaaaaaaagttttttcaaagtgatcactcctaataatttgtctatatttcgtaatattattgtaacataagaaatatatctgtaaagaaaaagttcggaactttggcaaatttattttgcagggcgataacctgcctttttcgcttcttcgatggttttaaaccaagctcgtggattggttgtattgtcataatatttactgccaggtaggtgatagacaccacttttcgaacctttgatcaggccttttccatttttatcgacatattccttagcggtagagacgcttgttgatgttgaggattgtgattttccttctatggtactggttccgtctgcgtaatttagagatacaccattttgtacattaaaaatataaacattgaagcgcacctcatcgctaccgattgattgagccatcatgtgaacgccgcgggctaaaagttcatcaccgcgaaaaacgggaatgacggaatagcggatataattcttgttgcttttttctaaatagtatttgatatccatctcgaaacgcagcatttccgggctgttcaattggcgcgttccggtaatcaaatttttccagttggcattttgtccagtcagttgataaccgattaaatgtgaccgattgaataggtattgaccattgatttttttgttatgccaaccggtgggtgttacactggagatttcaccgcgtttctccgttggcatcagtttcttgtttagtaatgcctcagcatctgttgcacgatttaaatgatctaagtcgccatatctttcccatggtccattttcgatcgagagctcctctttagaaaaggttggattattttgattgatctcgattgtctgagtgccttcataattaagctgagccaaatcctgctgaggcggaacaacttgagtttgcttttgtgttgtttgtgggggattcgatgttggttgttgaagctgttcttttgcgctgtacacagcgaaactagctgccgcaatcacgatcgcagcaactagtttagttttctttgacaagggaattgctcctattctttctgtaaattaagtaatgtagctttgcttattcaggtgcaccgatgattttaatgtattcatccggattcataatctcaaaatgtttggcaacaagttgattccgtttattgcggcggccttcaatgtggatcatatatttattttccggtaaacgaaaaacgtaactggatagataacgatctttgattaaaacttccgtcttgttttcaccatcgctcataatcaataaggacatcatgatcggcttttcttgcagtaaaatcgtcttttctaataagccacgatattcttccaaaaaatcacttcctttttatttaattggataatctgattttagcatttttaagcaattaatgctttgataacgaaatgattaaaagtgaagagagtcaaaagcttttttagttcactccagaacagtttgcttcaaaaattctgaagtgaactgttctttttcatgatgcttgtgataccttatactaaatttaggaggaatacttatggataatcgattatcaaatttatattctttgctggcaaaacaaggaaaaacttttgaaatcccctatttggccaaaagatttcaagtgagtacccgaacaatctacaacgatataaaaaaactgaatgaaacactcatggcggcctctgaagagataatcgccattgaaaaggggcgtgtctattatagcgttgataatcctgtagagattgaaaaattattgctcaaaaatagtgattttattagtggtgataaaagcatcagaagagttcgtctattagagacaattttattgttacctgattatttcagttcagaagagctattacgaaaaacactagtttcaaaaaatactttattgagtgatctgcaagaagtgcgcaaaattctacagaaaaataaaattacgctagaatctttaccatttcgcggttatcgagtgatcggagatgaaatagatattcgtaatttattagccgctacacttgaacaggacccattattatttgagacggagcattatgaaatggaacagccgttattagcagaaatcgagtcattcattgaaaaaatctgtgggcagttggggattcaattgagtgatgaatccttccaaaaggtaatattgcacttttggatcactaaaaaaaggagcgcattaggaaagacacttgctgcttcaaataaagaggatattttgagcaaagaggaaaaagctctacatgagcggtgtagagaattgactgaattattcagacagtcaattaacttggcggaacaattatacttggcaaataaaatatctgaggcgtctattactaaataccaagaattactttcagataaatgggtaacttttaacttagttattgaaagatttatttcagcggtgaatatgcaacttccagaattggattttaaaggggacaaaaagctatatgaaggattaatcaatcatttacgaccagcatataaacgagctttagcgaatgagacgttggaaaaccctatgtatgagcatgttttagagcattatcgtgagttgcatttgattgttcagaaacaaatttcggtgattgaaagaatgcttgagattgaatttactgatcatgaaacaagttttttcacacttttctttgcagcttcagtggaacgaagtaagttttatgttccccataaagcaaaagttgttattatatgcaatgcaggaattagcacttctgaaattttaaaaagtaaaataaaaagtatttttagtgtagatgttatcggaacctttggagctagagaaggtgttcgttggatagcagagcataaagtagatttagtaatcactacaatacccttagatttaaagcgagtaccgtttgttcaagtaaatccatatttatcagaagaagacattcaaattattagtgaattcattaaaccagttttccatgaaattaatgtagatgacttgttgcgaatggtaaataagtatgtgaagttatctacgcagcaaattcacaacttaacagaagaatttaaagagtatttgaatattagatcgagtgaaaatttaaaaagggagtatcagcctatgcttaaggaaatattatcagaagatttaattgatcttcactatcatgctgaaaatcgtgatgaagccgttaaacgtagtggggaactattagtaaataaaggtctagcttcagcgaattatattgaggggatgattaggaatgttgagattaatggaacttatattgtgattgcacctggaatcgctatgccacatgcacgccctgaagaaggtgctttggctattggtttcagcattgttactttagaagaacccgttgtattcggtcatcctaagaatgatccggtaaatattgttatcgggttatgtgcggtggatcatcaaacccatttaaaggcattagccgaattagtagaaatactttctcatgaacaaaatgtagaaaattttttgaaggccacaaatgcttcggaaatattagcaatggtaaaaggaggaaatgaatcatgttaaaaattgtaacggtttgcggtgcaggggttggtagcagcatgatgatgcgattattcacacaacaaattttggatgatgagcacattgaagcaactgttgatgcggcggatattggttctgttgatccaaatagttttgacattttaatcacaacatcagattttgccgatacactgcgtgattcatcagctaagattattcggattgacaatatgatggataaagaatatttgaaagaacaactattaaagacaatcaatgaataggaggcaaaaatatggcaatctttttatatattgtaaataatgtactgagccaggcagtatttattattggaatggtagtcgttgttgggatggttgctcaaaagaaaagctgggatcaaattttgcctagtacacttaaaacaatgattggttttactatgatcaatgttggtggtcaaacattaggtggagctttattgccgcttcaacaaatgatctctaaaatatttgatatgaaggcattttcttcagatattggagctgctcaggctgaaagctttgcagatattggaacagaaatggcgttgatttttgcttttggttttttaattaatttgttgttagcacgttttacccgctttaaatatgttcatttatcggcgcatgtttcatttttcttcgcaggattgatcgctgcattactaaagttcaatacaacattgccctttacagggattgttacggtgggttccattatgttagggctatatatgacgcttagttgtgcttatgtagcagtatgcataaaaggagttaaaggaggcgaaggatttactttagcacactccagttcttcgggattattggtagcgacactgttagcaaaagtatttggaaataaagaacatgatcttgagaatatggagattcctaagaaattgaattttcttagagaaatgacgatcgcattgactttggtgatgactgttctatttttactagtgagtctttttgcgacacctagttggacaatggagaatattactggtggtcaggatattatcgtcttttcactattacgaggtgttgagttcggaatgtggatcacagtaattatcaccggcgtgcgcatgatgctgtcagagatcataccagcatttcatgggattgcaaataaaattattcctaattcgaaacctggtttggatatcccgttactatttccaaattatcctacttcagtgatcgtcggtttcctatgtagtttagtcgctggtttagcaggtatgctgattcttggtgcgttaaattatccagttgttgtttttccagcattaattccgactttcttcactggagctgctactgctattttcggtaatgcacatggtgggcgtagaggagcaatattgggatcattgacaaatggttttctattgatttttggtcaagcattattgcttccaatggttggaagctatgctcctattatgcgaatcctaagtgaaacagattataccgtatacggtcccattttaggttggattttacaattacttggaggtgcttaatgaaaaatctagttctgtatttgactatcaactatccaacaagagaaaaattttttgagatcttagatattgtcgaagaatttcaaatagggtacgttgaaattggtattccagtttctgatccatatattgatggttcaatagttagagaatcacaagaaaaagttttttcaacactgagtatcaaggaaattgattctgtcctgcaagagatacgcgaacggtacacctttaaagtgatcctgatgacttataatgagggtgttgaagaatttaaattaggacagctttccaaaacgcgttatgatgccattttgtgtgttgataaaaaattgcctgaagataacttctctggtcttgttcatacatttacgaaaaatatggataaggaagcgataaacaatcaattagccaaaagttctcagtttgtttatttggtttctggggaaggaaaaacaggtgagtttatacaacttcctaaagattatgtagatattgttccttatttgaaagctaatacgcagctgccagtttttgttggttttggagttaaaaattcaactgatattgccagcattttagcaaatggtgcggatggagctattattggttctgaatttatcaaaagatttaatgagggaggaatttctagcatcaaagagtatttatcaaaaatccgttcggtttactaaaacaggattcgcttcattcattcgtgaagcgaatcctgtttttatttttataacgaaatagctcgcattaccctcagcaaatttgataagataaaagaaaaaagtctagtggtaataagtcaagataatttttcaaaagatttttaaaggtagttaatttttgaagcgcactgaactaaacccgaccaaaattaaaaattttttcgggtacttccaaggattagcgtcaataacatactgttatttatctatcacgctccttggtggcatatagagttgatggttacgtagtagcgtatccaccagacgcgtaaattttcttgcggttagtacgatggctcgtttgtgtttatgcttgggtgtttcagcgtattttttcttataatacgcatggtactcaggctcgtatctccttacggagttggtggcttcaactagataataacggagataacgattgcctcgtttggccataggagtattttcatactcagagttacctgattggttctgtcgccaatataaaccggcatatttagccaatttgctttcatctgaaaagcgattgatagggccaatttcagcgagtatacccgcagcataaacaggaccgattcctggaatactggttaaacattgatattcaggtagcacaacgactaaatcgtcaatggctttgtctaagtctttaattaacttttcaagactacgaatttctttggctagaacacccaaaacaatatctacagagtcctgatggacttttcctaaccggtaggaactacgtatggctttagaaattgcctttgcaattccttcgggatttttaaaacgatacttccctagtttttgaattaggttcgcaaactcttctaatgacagttcggcaagttggtccattgtgtaatcttccgtcattagagttactaatgtggcacttaaaacggatccaccttctgcttttagttctttagaaagcgtgttgcatttataataaatgttttcgataaagtgttgctttgtacgaaccagctgtttaattagctgataacgcgttctagttaagtgttggagggcaaggtattcttcctctttaatgatggagttgacttgcctttggatgcgaaaatagtcagcgatataaaaagcatcaatttgatcgtttttgttttcttcaaaaatatcacgatactttttaattttatttggttgttcaactgaaaccataaggttcaattgatttaactcaagatcttctttaaaaaacatagctggatgaaagctatataaagatgtggcctccattccaatcactaagctctctatctcaaatttttgagaaaattcgagaatgtattctttgatctggcttgcgccaagttgactatttccataagatgcttcttttaaaacagagcaagttgaatcgtctgtcataaagcaagcatctaatttttcagaactaacgtctaaaccgacaaatagtttcatgtggaaggacctcctttcattgattattcggaaattgcttgggtactgtgggatatcccagaatcacgttgtctaacgacagcctcgcataatagagtttcattcattaaacctctaagccacccaatctctactaggattggtagaggtcaatggactcagctagtgtgttggaggttataccaacggttcgggtcacagactttctgtcgcagtaaaactgcagaaggtgatagcgtcttcccgtaagtcctttccaagacttattattcaggaatatcctacagtatccaagtagtaatcgttattttatttaaacatattaggaatagcccctaagggcgattgaaggaatgaaagtttcttcaaaatatatattacgagcaggtgaataaatggggatgtggaatccgtggcgtggctgtcgtcgtgtcagcgagggttgtaaatattgctttattcatgagggggataaaaagcgagcagtagatacaagcaagattgaaaagacagctcaatttgacgcgcctattaaaaaaacaaagaatggttataaaatgaagggcggacagctcgtctttgtttgtttttctagtgattttttaattgaagaggcagattcttggcgcgctgagtgctggcaaatgatcaaagagcgcagtgatttgcattttatgttcttaactaagcggatcgagcgtttaatggattgtgtgcccgaggattggggcgacgggtacgataatgttacgattggtgtttcagttgaaaatcaggtccgagcggatcaacgattatcgttattacaagcgttaccaatcaagcataaaaaaattgcttgtcagccactaattgaagaaatttccattgctgagtatctgacggacatcgagtcagttgttgcgggtggggaataccataaaaatgcgcgcccgttaaattatgaatggatcttgaagctgcgggaagaagcaatctcgcaaggagttgcatttgaatttcgtcaatgtgggacgcattttattaaggatcagcaggagtatcaattgagttaccgccaattattttcacaagcaaaaaaagcggggatcaattggtatccaagtaaataaagaagcagaaatcactcggatttctgcttctttatttattcggataaatcttcatttagttctttcgcagcaagtgccacacgcttattcccttgatgcagttcaacgattgtccagactaacaaagcaagaacagcaacaatcaaaacataagcgatactatcggctgttgtgatttcccatgcagaaggactgtctccaaagaagccttcgatttgactaggcaaaccaattaagttcaaataagtcagaccaataactgagatccaacccaacagttgaatgattcgtttatttttgaatcgttcccccatttctgcgctgctatttgtcatcattaataagggaagcatagaaaatggtaaggcaaaggccaagaaaacttgcgaattattcatcaaattatttaatgcttcatgttcttcaacgactgtatcgccgcgcgttagcaggacgcaaatcaatactggaacaaccgaaatcaaccgagtgactagacgacgcaaccagatcggcatccgcatgtgaacaaagccctccataattacttgcccagtcaaagtaccagtaattgtagagttttgaccagaagctagaagcgctacagcgaataaggttgatagagcaccagtttttgcgacattcatcaggattccgttgctcatcgtagctggatttgataaggcttcatacagtccaaagaaggatgggtctttgacagtgcctgttttaaagacggcaacacccataatcaaaagtagtgcattaacaagaaaggctaatgacaattgaatatttgaatcccaagttgtaaagcggacggcatttgcgacatcctcttcatcatcatgatcaacttcgcgagtttgagaaaccgcagaatgaaggtaaagattatgcggcattaccgttgcaccaatgattccaagcgcaccagtcagcggtgtttgaccaccaatggcaggactatttgcgaacgtttcgctagttggaacaaatccttttaaaacgtcaccccaattaggatcggacaaagcaacttggtaaataaagacgaagagaatcacaaaaattaaacaaacaacaatggcttcgattttacggaatccgactttggttaataataatagtagaaagacatcgaatacagtaatgaaaacagcgataaccaagggaatattaaacaatagatacaaagcgatggctgcaccgatgacttccgcaatatcggttgccatgatggctaattcagtcaagatccaaaggacgatccccaaggatttacttgtcctagcacgaatagcttgtgccaaatccattcgagtaacaattcccagctttgctgccatatattgtaaaagcatagctactaagctggaaattaagatgatggacattaataaatattggaaattttgtccgccagtgatggaggtcgaccagtttcctgggtccatatatccgacagcgactaatgctcccggacctgaataggcgaggagtgttcgccagaagctttttccttttggtactttaatcgtaccgttgacttcctctaaagaaagtccattcgtatgttctaaaatgggatgtttattcgtactcaagaagctcccacctttctgtaaacttttctacgatgcaatcatacacctaaaatcaggaaatgaaaagaaaaagattcggcatgcctaaaattttcaaaaagcatatttctttggcataattcgaatttgttttacactaaatagaagaaaatgaggtgagcgtatggtcgattggtacacacaattagatggtacgtgggaaatcaaaggaacgaattttccaatgtggttgacagataaaagaaaaaatccccgaattacctataagagaacagagaaaaatgctgtggaattactcgatttggtagaatatgaagcaaacggcaaaaccaagcaaatcagaggaatggaccgtttagtcggtggacagtttatctggcgaggaataggaataatgaaaattttgagtagtcgttggcaggtagtgacaatcaaaggggatgtattagtgattcgttttgaaaaaaccttcgtcacaccagctggggtagatattttaataagaaggggatctcggagtcctaatttgcgcgaacgtgtcttagaacattacaaaagttttggtttgacggataaagaaagagatacacttcaatggaagtagagccatcaagtaaagctaaaaatattttataaaagaaaagccaaatgggcacttgctttcttgatgcaaagcagctaaccagttggcttttttagtgtttttcgtttattgactaatctcaattactcgatcagtccagtcttgataaaagctctcttcgtgagaaacgacgatgacagttccagcgaaattagctaaactttcacgtaagctgtcttttgttgcctgatcgatgtgatttgttggttcatcgagaatcagcaaatttcccttttgcattgtcatttgacaaagcttaactttggtttgctcaccaccacttaaggtactaagtggttcttgagctaattgattcggcaaccctgctttagcgagatgtttccgcagctccttaacagtttctttcggaaaatgttcactcaaatactgtaggggagtctgatagggattttcccattgcagatcttgctcgaaataattaattttcgtatttgcaggaaagtgaaattcacctgcaattttaggaatcgcctcgatcaaggtcttcagtaaggttgatttaccgatgccgttgaacccacgaatagcgactttttcgccatatcgtaatgtgatattgattggcggaagcagtggtcgttgataaccaatttccaaatctgttgtctccattgctaacgttgtaacgatcggtgcatatgggaactcaaagtgagcgaccgcattagaagaaggcggcgttaagcgttctactttgtctagctgcttttgacggcttttcgccatagtcgaacgtgagcctgctttgtatttacgaatgtaggcttctgttttctcaatctgacgtttttgagcagcatattgcttcatatatgtttcctggaattgttccttttgtttcaaggcctttgtcaaattaccagtatacttggtcaatttcccaaactcgatatcagcgatgtgggtggtaatttggttcaagaaatcgcgatcatgagaaatgactacgaaagtgccggaaaaatcctgcaaaaattgactcaaccaggctacgtgttcatcatccaaatgattcgtcggttcatccaaaatcagcacgtccggtttttctaataataattttgccaaaattaattttgaacgctggccaccgcttaaatcctccaatggcgtatccatacccaaaacatctaatcccaaaccactgctcatttcagcaattaacgtatcaatctgataaaaatcaccttgatctaattctgtctgtagctttccagccttatctagcaatttatcatccatcgattcactgtattccatatacagttcgccaattttcgcttctttaacaaaatctgcggcataggcagtttttagaaaatctttgatagataaggttggatcgacttcgacatactgatccaaatagcccacgtggatattcttctgccaagcaatcgtgccttcatccggtaattgttcgccggtgataatttttattagggtactttttccagcgccattttgtccgatcaggcctaggtgttcccctttgttcaaatgtaattctaaatcttcatacaggattttatcgccaaattgttgcgcgattcctgttaaatctaagatactcatgtttctcctactttcttactcaaattcccatcatctaacaaaagaagcggatagtcaagaaaaaaagagccctttttcaggactcttcaatttattatagttgagcagagaacaaataaagaacaatgtcagcaatcacatcaatgacctgacagaacaaatctgttagatttttaaagaattgtatgattatttcaagcatattttacctccgcttagttaaataaaccggacaaccagtcgattggataaagagacagatgtaaggtgatatgggctagcaaataacttattgcgaagaatggaaataacacttttttcataaaacttctacctccatatttttcgtttcttcagtataacgtaaaattcatagaggaagacatggatttaccttatctttaacgaacaaatatgtaagctgagtatataaaaaagcctctgctttctaattctaagcagaggcttttaattataggcttcattcattgagatacacgctccttaggcagattttttgaagtcgtagatcgcttgttcaatggtgattccagttccttgttgaccagtgattgttgagtaaacaacaaaaacattttgttctaaatcaaaagtcacacgataaggtttttcttgatcataaagagtcattctatttcctcctttcatttaataacatcattgtaaataaaagtataacacattagaacaaaataataaaacaattttgcattcataaagtattctaattatttaaaatttggagtatgaagattttctcttgttatacctaagaaaataaacttccgggaggaataaaaaaagaatcatcaagcaatttgttaaagctattaatcagcaaaatttaccaaagattatccaaatgatgtcagaggatttccagttcattgatacgtatggcaactgtgaaaataaagaagcgatgaagactggttggcaggggtattttgattggtttcctgattattttgttgaagttgaagaatggattggaaatgatgattttacgatgattattggcaaagtaagtggatcttatttaggaaaaatggacaagcattgggaaattccagctacttggaaagtagttgtcgggcaaggtcggcagatagcgatttggcaggttttctgcaattcaaaaaagcagctagattcattgaaatagcgattctacaaaatatagaccttaatatagagggattctacaatgtttaggtagaaaaatcatttctttcatttatgatgaaattaaaaggaggacgtaaagtggagatcggaaagcaaatcaaagaacaccgaaaaagaatggaatggacacaaaagggactagcagcaaagctcaatgtttctgacaaaacaatatcgagttgggaaacaggcagaacctatccggaattgtcgcttctggtggaattaagcgaactgtttaacacatcgctggatgagcttttaaaaggagatgaagaggttgtgaaacggatcgataaagatgtcaaattgaaaaaggtatataaatatggattgatcgcgactttactaatcgttttctccggaatcatctttcttacccaataccagaaccaaaatcaatgggtggatcgtttcaatccatttatggaaatgaagatcggctacgcgacactaccaacttcggttacttataatgatggaaaaaaatacaaagaggatgggaagaaagaacagtatcctgatccatataagaatatttgggtagcagatgatccatttggagaggggatgctgctggattttcaaggtggacaggctccagaaggcaagaattatgcgttggtgcagcacaaaggcacctatgtaagaagaatctcattcatttcatggaaatccattccaggggtttatcgtgatattatgagtaaagactattttgaagtaccatcaatgaaagaataaaagagagatcaacaaatcaattgatttgttggtctctcttttataagctttcgcccctgccaaggacgtttattatagcacaacttaagcgggttgattatgaaaaattatctgcattgcatgtcttagtggaaaatagaccaggctgacgatcaaaattgttgaaaaaatattgattaccgttgcgggcattgtagctaaagccgcgaagaaagcgggtttcaattgagcaccagcgatcattgacataacggttgctttgattacagacataataaacttggcaatgccagcacagattccgataatgatgatttgacgaatccgagttggcttgcgcttgaaaaatgagaaggcgagataggcagcggcacccacaataaagctttcgactaaaaagtagggggcttcagcagcaaagccatttaggatgtcaaaaataaagaagccaattccaccagctaaggctccttgccaataaccaatcaacagcactgctagaagaaccaccgcatttccaaaatgtagaaaggcaccggttggcaaagggatcttgatcattgttcccattaaggtaagtgctgcaaataaggcaattaataccaggttttgaattcgtttattacttttcatctgaatactccaatcgtttttctccgtgggtgtaggcaccgtgccagacatgaccaacatacgggttgatttgttctcccatagaaatggctgcctgaacaaaatcaatcgctaatttgatagcttgttccaccggataattttttgccactgccgcagtaatggctgctgcaaaggtgcatccggccccatgattgtaaggagtatcaattacaggatgcggatagctttggaagctttttccatcataatgaaggtcgagtgtctctttcgtatctaaccgtgcgccgcctttgatgactacatgtttcacacctagcagagcgatctttttagcagcttcctgcatttgctttttagaagtcagttctcctagttcagataaaatacccgcttctcgtagattcggtgttacgatcatcgcgcgaggaattaatttttctcgcaagtctcgaacttgattgcttttgatgaaatcttgggttcctttgccaccaatcactgggtcaacgatcagcggaatccctttaggaattagtgtactaaccaattcgatcatttcttgagaaggtaacaatcctgtttttaaggcatcgattgttcctgcgaagattgacacaagttgttcctgcagtatttccaaaggaagtatccgtaaatggtgagagccattattcggatctaaattaacgatcgaagtaattgcggcaaacccaaacgttccgaattcttgaaaggttttcaaatcagcttctaatccaccgccgccagtcgcatctgaaccggcgattgttgcaacttttttcatatagtaatgctccatttgttttttattagcatatctttttgtcttacctatgaaaacagccaattggatttgttttccctcatccaatttttatttggagattgaatactcaggctctttttgtcaagctttccagccagcttaaatattcctcctcgcgatgaatcgcatgcatcaggataaggtaatggccatagttttctttaatctttttatcaggaaaaacggctatttttctgtcttctagatgctccaattttttttgatgcaagtcgatttgctgttgaatcatttccggtaggcgctcatcatcaatactttttataaaatataatttcaaaacaaactcgtctttattggttggtaattctgttaagggttcattaatccattcgagtaaggccattcttcctgtttttgtcaaggagtaaactttcttttcaagttttgttcccacaatctcagtttgaaaatcaatccagcctttttttgtaagcttagataactcaggataaatttgactgtgcttcgcttgccaaaattcaccaatttctgtagtaaacgccgtttttatatcgtatccagtttttttatcgtcttgcagcattcctagaataatgtattgtaatgtatttttttgtgcgatgttaaacatctcccttgacaattgaataaaatcattttatcataatcacgtaatctaaaacatgtaaataattacatgttgtcaattgactgtttggagggattaatttgaaacaatttaaaacattggaagattttgtcggcacacactttatttatacgtatgataatggttgggaatacgaatggtacgctaaaaatgaccacactgtggattatcggattcatggaggaatggtcgcaggacgctgggtgaaagatcaagaggtgcaaatggatcttttaactgaaggtgtttataaaattacttggacagaaccaactggaactgacgtagcgcttgattttgtgccaaacgaaaagaaacttcatggtaccattttcttcccaaaatgggtagaggaacatccagaaatcactgttacattccaaaatgaacacatcgatgaaatgctggaagctagagagaaatatgaaacctatcctaagctagttgttccagaatttgcgaacattacttatattggtgaggcaggggaagacaacgaagatgtgatcagtgaaacgccttatgaaggaatgccagatgatatccgaaatggcaaatattttgatgaaaactatcaccgaatcaataaatagcaaaaaaagttcaacattctaaaagagtgttgaacttttttgctattttgttttcatccattggtcgcgaatttcatcggtcaagcggatgattcgttttccaacttcggggtattgattcgtggctaggttagctaaggaaacgcgtaccgcccactcgccgctgccaaaggcgttagccttcagtaacatcaattgttctttttcagctagagaagttagaacttttgtgactgtccacttattttttagataatcagcaaaggcattaccgtaccgcttacgggtccaatcttcgtaattgatctcgcagtaataagcagtgtctagatcttcaagtggttcctgcagacctaaagtattgaagagcagcttttcccgttggcggcaaatatccattacttcggctttataagcttttccttcatctaataagctgtacaaactgaacatcaccatcatcacttgttgtggagcggacaaaccagcagcatgatttaaagcaacgtcacggctgtcagctacaattcgatcaataaaggtgattgttgtcggatcagcggtcagtgaagcgtaacgttcatttaatttttcaagcttttcttgtggcaagttagcaatcagttcgtcaaataaattatgtttagcaacggcgattgttcctacacgccagcctgttgcgccaaaatatttcgaataagaataaatgcaggctgtattgtatggaatctccgaaaacagggaagtgaagacagggacgaatgtgccatacacatcatcagttaaaatcattaattcaggattatcggttgcaacaatttctttcagcaaatcaatagtcggttgagctagggcatttgctgtcgggttgcttggatttactacaaagactgctttgatatcggaatcacgcagtttattgatttcttcatctggatattgatacgtcattttgccatcaatcatcgtttgtttggcttgaactttaacaatctcaaacgcatattttggcaattcgggaatttctaaataaggtgcgaaagttggtaacatcaatgcgatcttatcaccatgattcaataaaaaattattaaacaaagtatcaaaaatataacagatccccgcagttccaccttccacagcgaaaatatcaaagggaatggtgctgtcagaaaatagctcttgatttaggtaagctttgatcggaccttcgcaggcacttaaacagcgtactggatttgggtagttatctccgatgatatgatccaacatatccgttaaccaagcttcttttggcattcctaaataattgttgtcagaaaaccagattttttttaagaagttggctccttttcccggatgagattctaagaaattagtaaaccgttgtccacgtccagtatctgattggatcattcccgcggttaattcaccagtaccataaagtgtttcctgtgtggcaaattgaccaagtaaaaagaaggcttcccgcggagtaggagcggtccagttaggatttccgcgtccagcattcagtaggttggtaacatttttattttcatgaatcttttgttccaaaaagagacttaattcaaagggacttaattcttctaaggcttgttcagtaattgttgacacaaatacgactccttctacactgtattttgattctatagtaacgagaattgtttttaaaacagcgtaaatacgcttagagtttatgagaaagtttctgttaaaacacaaagaaataaagtatgttttttcttcgaattatcttttaaggctggtataatagataagttaacgcttacgaaaatattgggataattttcacggttttcccgatcagatatcagtctttcgccccatgtaaaacggtaaaaaaagaggcatactattcctataagttaattgtcgtgcaaattgatggataatgaagtatatataaagagattaaggagggatcagagatggatcaattaatagctattgcgttcatcgcattattggttttctttgtcgtaaaggtggggtcaatcttgtggcgtatcgctggcgtattgtttttactatttatcatttacatgtataaagaccaagtcatcacgcaagttcagaattttattgctgaccccaattttggtggattatggcagagtgtttcaagtttcttcggagatttgtttgataaagtcgcaggatttgtaagtacagtaattgaatagactgaaagaagttctcaaggtgagggcttctttttattttggatttaaattttttaaagatcggatggatcgaatcgaaaaaaatatttgaaattttaaatcagctaaacaagctagaacgagtctctgcttcctaatgaaagtagagactcgttctagcttattttctatccacgtgaattaaatacttttgacatcttcgataacttgctaaaacattttcgggtacctcgacatgaggaataaaattcgtaccattcggaccgtaaccatgctcatcatcatttaatcgacgaatctcaccaatgactagagataagaaataatctggcttccaccatgtgtccattagcggattttcgaaatgggggtaagtatcaaagtctatcagttttggttgctcaaagaaaagcggttgaatcgcagacaattgtagctcccattccttacaaaaggtaacatggctgcgcttttgtaccatagggtcttgtactagccaaaagcttttcggagcattctgtttaaataggtcacgagaaaagcgagcattttcaccagtatttgttgatttcttttctaatagcagctctaaatcacgtgaacaataatgtaagaaaatttcttgagtgatctctgcttcagacagatgtcgccattctggacgaacaaattctggatacatttttttgcaattttcaatcaagggtgcggtaccgtgaccgatcccgcctacaaaaacgacacgttgaattgcaagttcctcttcacaaaacttcgcagcggaaacaatcaaatggggcaaactattgccggcgataatgagagtatcagattcaaaacgcggattatcttggattgttgtgagaaaatttacgagtgtagcaaaatcagacatggtgtcctccttaatatttcgttgaataatagcttatataatagtagcaaaaaattagacagaaaaaaactgttggtgaattttaccaacagcgaatagctaaaatagatagcggatgaaaaagaaaatacataaagcaaacaggatgacggataaggtcaaccatgatttttgcttgatccaaagaaattttccgtaacaaaatgacgctgcagctcctgtgacaagactgactaggtccattatttcactatcttcgataatacgggccattagtaaaatactaaaaagtatcatgctaaatatccctgccgtcgctagagctaaatctgtactcgtttgttttcgatttttttccatccgtttccctccaatctatggggttcatctatcaaattaatttattcgttattttcgagttgaaatcatagtttatataagcttttttaggtctaaataaagtgtaactgaggcgaaatgatgagtattgttctttttattataattgaagccgattacaatgtcacgtgtttaagaatttactatttgataaaagagctgttttttgattttattgacgacgaataagttttttggtatcaaatactgtatagtagtgtatacttgatgggtgaaatagaactagatatattaatggagagttattaatgaatggggtgtgaacgcgtgacaactttttattttgtaagacatgggaaaactgaaaacaatgcggaaggactttttaacgggggaaccgttgattcgcccttgattccgtctggagtagaagcgacaaagcgaatggggaagcatttaaaaactgttcagtttgatgtggcgttgtcctctccgcaaaaacgtgcacagacaacagcgaagcttattcttgaggaaaatcaaaatccaccagagatgaagattattgaggatttgcgagaaatgcgtttgggagattgggatggcaaaaagattgataaaattactgctgcctatcctgaggatttgaaaaattatcgcacccgacctgatttgttcgatgcgaaaaaatttcatgcagaatcttatattgatttgattgcgcgaagtacaagggtaatcgaagatgcaaaaaatgcgttgcctgatggaaatgttttagtagtaagtcatgggattttattgatggctttactaaatacgttaaaaggggtacctttagcaaaaatccgcgaaagtggaatcgtagataactccagcttgaccattctaaattatacgaataacaacgttctttttgagttgtggggccaatcattttaaatgaacaaataatgaataagtagcttagcaaaatcatttctagcttgctatatacattttttcaatattttgtttatatggaatattttctgagtagaatttgttaattgttgatagatgtattcgttaaaagtctaaatgataaaaacagttatttgtggcttttttaattgacataaaatatgagaaaataacaggggtttttcagggattttcgagataaaacacttagtttttacttataagtgatcacgttaagtatattttagtaaaaaaatagtttggactctctcgtattgaagtatgaacattaaaaataacttttaaaaaactctttagcgttctatgctagagtgttttttaatttcagtaggagtcattcttttgtgggtaaaaaaatgttctgttaaacctcgaggaattaaaaatatcagaaagaaaaccaaaaatcccttcgaaattttattcgaaaggattctcatttaattttaatgtatagagtttaattagttaataggtcttttcgttttagacgataagtcaactcgatcatcgtttcctggtcttccaacggaacagaagcatcggtcaaaaagtactcataactacggaaggtaaagatgccgttttcctgcttaatcgcttcgatcaattctttataggaatctgtcagatcgtcgtagtctcccacatacaatgtacgaacggcctgatagctaggtaattcgtagctttgaaatttttcagtagagggaatttccttatttattggaaagccgatttctacatctagcagttcgtccttcggctgtccatcactgtcgagattcaaataggagataaacggtgtgcctaccagttcggccccattttttttgatgtattctaataaatctacaaaagaagttccgatgtaatttggcaagtgctcatgcgaaatgtgtgtagacatcgaaacgattgtttttgctggtttggtaatcttctcaatttgcatttttatcccccgtttcataacacttacgatgattgtaacaaggattgaaatcgaatacaaatgggaactatctattttacgcttcaaaacccaaaacttgtccgtgttgatttaaataattaaagaaaatagggaacaggtctacatccgccttttctaaccgttctttagaagcaagacgttgccaggttttctttgaaatatctttttccaatctttttttcgcttgttgaaaggtcggtttacggtgatagaccactcgattcaacaactctcctttagcgtagagataacaataatagacgccatcttcttgtagtatcccaacaaacgtctgattttgcataatctggatcagctgcttattacgtcgcaaaaagcgttgtacagttagataataattccaccattgagcagaggcttcataatcctgtcgttcactcgccgcttgtactcgctgatcaatgcgggtcagtaaagcagtagattgacctaaaagagtctgtttgatctcctgaatacgcaattcaaattccgcctctggtgtcatatcatcgtagtttttaacgattcccgctacgtattttaatgggccatctaaacgataggtactattaataatttgcttcaattcttggattttgctttgtttaaaaaaaggaccgatgactaagccatcttcagaccattcacttaagactttcagatacggagctttatcaataaattgaaagtagccgtaaccttcatagtaattcatcattcgattataacgagggcgaatttgatgaattaaatggcattctaataagagagcatcaaattctgtatcgaccgttttgtaatcaaaatcatcgatccaacgaatcatttctaaaacttttcgtgagtgctgcctattttgaataaagtaagaattgactcgttgtttcaaattttttgcttttcccacatagataatatctccgtgcgtgtttttcatcttataaattccaggtgattttggtaaattcttaattttctcttttagcatcgtttcactccgtttgttcgatttgacaaaaagacttttaataaatcgtttaaaagactattccagaatcaattttttaagaaatttgaaaataattgaaaagtaggcgtttttggtctattctctgaaaaaataatctaaaatatcaaaaaatgcagttgttaaacaatgaccatccatttctattgtgttataattaattacgttaagaaagcaatgagagagagaaatggagagatgttaaatgtcaaataaggttttgaccagacgtgaattgcgtcaacaaaagcgacagaagaccatcaattaccgtaacattaaaaaaggttctgctgtagtaggtacggcactagtagcggtttcagtagcggcaccactactaaacactaacgaagtagaagctgttgaaggaaaaacaaccgccaccacgtcaaatgttgataagaaggctttcattaatgagatttcaaatgaaatcaaaccgttagccgaaaaacatgacctgtatgcttcaattatgatcgctcaagccatcgttgaaagtgattggggacaaaatgaatttgcgaaagccccttattacaatctctttggtttagaaggtcaatacaaaggtcaatctgcaatgttggataaaacgaaccaagaaactggtgctactgaaaagaaagaaatgaagcactacggttcttataaagaagcaatccaagattatattgagatcattaagacaacttcacgcgatggcaacgaaaattatttcagcggcacatggcgcagtaacgctaaagattatcaaacagctgctgaagcactaaagggacgttttaatgacgatgaaagttatgttcaaaaattggtttcagtgattcaagaaaatgatttaactagctatgacgcaactgaaccagtgacaccgccagtagcacagcctgctatggaaactccggcacaaccacaagagtatacagttcaaactggtgacacgattaattctatcacggatcaattcggaattggtgttgatgagtttactgaatggaacaagattgataataacatcatttatgaaggacaaagagtggtcgttggcaatggaacagcaagtgaagaaacagctccggttgtttcaactactcctgtagaaacagcaacaccagtcgaaaacaccactccagtagttaatgaaccgattattgataatacaccggtactagaaaatacacaagtacaagaggaaacaaataaagtaccagaagcatcagttgtaacaccagatgcagtacagccaacgccagaaacgccagttcaagaagaacaagcaccggctgaagtacaaacaccagagcaacaacctgaacaaacgcaacctgaacaagtacagccagaacaaacaacacctgaacaacaaccagcaccagaaacaccggcaacttcaggtgagcagcaacaaacagctccagaacaaacaactgattctcggggtcagcaaattgttaatgaagcggaaaaatatattggcacaccttacgtatggggtggaaaagatactagcggctttgactgctcaggtcttactcaatatgtttataagcaagtaacggggaaagatatcggtgtttggactgtggcacaagaatcatcaggcacaacaattgatgttagccaagcacaacaaggtgacctattattctggggtgaccaaggatcaagttatcatgtggcaatctcagcaggaggcgatcagtacattcatgctcctcaaccaggtgaaaacgtgaagtatggttcgactcaatattacgcaccagatttcggagttcgcgtatactaaaattaacttaaaaataatatccaagcaggcttaattcacattaatctgcttggatattttttgattgattaatagaaataatatccgctaaattaagtgacgacatttttgaaaatgataggagagtaacttgcgagaaaaactattgaaaacagagcgtctttacttttcgttttggtcagaaatcgacatagctttagcagaacaattatgggagaacaaaaaggtaacgcattttattgctaagaacggctgcctttcaaaagatcaggtgattcaacgattatctttagaaattcagagtcaagaggagtttggttttcagtattggccgctcttttttaagcaaaacgataagtttgttggttgttgtgggttgcatcattacgatttagaaaaccgaatttccgaacttggctttcatttagttcctgaagcatggggaaaaggcttggctgctgaagctgctagagcagtaatttcttatgcggaggctcaaacagatttgaaggcattatttgcgggacatcatccggagaatcatgcctctaagaagttattgcaaaaattagggttcgaatttcaaaggaaggaatattatgaaccaactggattggagcatccatcatatttgttgaaattaactttgaaggaatagctgatgagatctaggaatcttgtcagcttttttttgcttccccttattgaaaatggttcgaatgtagtaaaaaaaatgattatgttttcttttgggatatccctcgatctggaaatctttaagtacgtggctagtttggtcaaataatttatcaaaatgttggatcgacaatatttggctgatgaaatagagttagaagaaccggaagcatcggttggcatagaaaaaaatctgtaagtgtaaagcataatactttagtttgcttctaattaaaatggttggtcatttagttgactgacctttttttgattttctattgactggactaaataggcgtgctatagtttaatcaaggattaatcatgattaaaccatggttaatgaatcgtcaggaggtataaaaaatggaacaatcagatgcacagaaaaagatcttagatactgttgttacagcgatgcaggaaaatcaaaatattgaaaaattgacgaaccgtcaaatcgcagaaagagctggagtgaatagtgcattaatcaattactatttcaagtcaaaggaaaatcttttactggaagcagtcaatatctgtatggggaatctatttgaagatattatccaaagaacttctacagaagcagatccgttacgtcgactgaaggaaatgatccaaggaatcgtcagcttaggctaccaacattatcccttagtcaaaatttctattctgaatgaaatgaatgatggcggaattggcacaaacaaaatgattcagccaattttgaaggagatttttcaagcagaaaaatcagaatacgagcttaaacttatcgcggctcagctgctactgccattgcaggtgatatttttaaacgcagacagctatcaaaactatttgcagaaggatttaaaatcagtcgaagaagagcaggaaatgttggtggagacgattttcaaaaatttatcactagtccagtaatttgagaaagggtgtaacaaaatgaagaaggttgcagttgtttatagttccaaatcaggtacgacaaaaatttgtgcagagtacatcgctgcacagatcgttggtagtcagttaatcaatttaaacgaggtaataccggatatttcagcatatgatgcggtgctaatcgggtcaggcattcgcatggcgaaaatgtataaaccggtcaagaaatttctagcaaagaattcacagctattaaattctaaaaaaacgattctgttcctcagcaacttttatccggaaacgatcgataaaacacttgaaaagaatctccctaaaaatctcgtagatcaactagatgtagtagagtgcggagggttggcaccgttcactaaagtaacagattgtgcgtggctaaaatctgaggagatcgatgcgtcactggcaaagcatggattgatttaaaaatgaaagggtgaattaagatgttttatcgagcagaatataaactggtcgccaaagaacgtttgcagggtagttggaaatatatggctggaatctatgggatcatctttggattgattctattttatggactattcagtcatgttccgattttagggatcagtctcagtgtagtttgcggaagttgtttattatttagcagtatccggatgaatcgaaaactgcaccatgatgagaaagtgcagcttgctgatttactcagtggatttagtcattgttttaaatgtgtcgggttgtctttatggattggaatttgggtcactttatggtcttgcttattggttattcccgggatcgttaaattatacagctatagcatggccttctattttttagaagaaaatccgaggatcagcattcgagaagcattaaatagaagtaaaaaactcaccaatggaagaaagtctcatctattcgttttacagttgtcttggttaggttggatcacactgtcgattttgacctttggtctctctttactgtggttgatgccatacatgggtgtgacagagtacgcggcgtttgcagatatgcagagtcaagaatctcatgtttttgaaggatagtttctctgctttccaaaagaatagtcactaattaattccataaatagaatattcgctgaccgagaaaagtcaatcctatatgtcgatttttcagcatatttgtgaatggttgggagcctttcacaaggtcgataatgataaaacactagtgagcttctcatcgattggaagaagttcgctagcgttttagtttgtcataaagcgacagagtaaattttgatttttgggtctttcaaccataagggataattcaaaagcctattgagtcgattcgatagcagaaaatgaatttatttttctgatctagtctttatcgcaaattatcttttttgttcagccttattcacttattttacaaaattactcgaaacattttctcgtgctcgtttaattcaacaaaggaaattttgcccccgtgcttctcaacgatcttcttgctgattgctagacctaagccactgccattttttgtggtgcgagaactgtctccgctgacaaagggttcaaataaatgttcttgtaattcttttggaatgggattgccattatccttaatctctaaaatcacttgatgatttaatggatagagtcgaatttgaacagtcgtattcgctgaattatgctggatactattaccaatcaggttgtcaaatacacgacgtagttcaattggatcgccaaagatttccaatggatcatctgtcagatcaataatcatgtcaatctgatttttttcagctaaatctagatgttccaataatacttcgcgaagtagctcagatagatcaattttttgttgctgaaggtgatagtcaggactttcgagttttgagaaaaccaataagcgattaacaagttcattcatgtgatttgtcttcgtaataatcgtttccattgtttgattcaatttatcttcgctaactaatccatctgctacagctttagcagaaccatgaatagtggtgatgggggttcgcaagtcatgagccatgttcgcaaatagcagttgccgttctttttcatagaggactcgttgttgttcagcttcttccaattgccttgccatatgattgaaggaatcttcaatttccacgtactcatattctgcgttcatatgaatcttttttgagtaatcgccattttttattgtacgtaatccattaattagaacagtgttcggagcgatgagatgctctttgactgatttagagtagcgtttcaaacagaagatgaaaattaataataatggaataagtagaagtacaatattttttaaattagctgatgcggttgctgagtaaagtcgattaaagaccaacataaagtttccacgaatcgttttttgtggcatcttagttatacaaacgtactcatgaccgtctactcctttgaagggagcaaaggtagccatatattttgtttgttgatcgttaaacttaaatgaaataataccaatttgatagagcttttgattgattatggattgtagcgcgtccatttctaataattcattttgtgagtagtgtatttttttttctgctacttttcctttggtgtatatgacattattctcttcatctaggatttctaaccatccatccagatcttttaaggtagaaatatcgatttttttataatctggacggacgatagtttgagcacataagttcttaatcatctcattggtactagaaataaaaaactgagccatcgtaccaaataatgaaaccaatactaataatagaagcgaagtcgtaatatattttttagtcaaaaaacgtccaagtgttttaggcttcttcttcatggcagtatcttatatcccaatccgcggattgtttggatataggattcctcctctctggttcccaatttttctctaagacggctgatatagaccatgatattattgtcatcaacgatataagtgtcttcccagacagcttcataaatctgctttttagtgaaaacacggccaggggagctcattagtaaccgtaagattttgaattcaatcgaggttaatgcgatttgttcatttcctttgaaaaggaggcattgttcaagatcgagagtcagatcatgtaggtcgatttttttcggactgtttatctcttgggcacctaaagaatagaagcggcgaagctgagcgctgacgcgcgctaccaattctaaaggatcgaaaggtttcgttacataatcgtctgcaccaatatccagtcctaagactttatctgcactcgcgtctttcgcagttaagaaaatgatcggtatatttttttctgctcgaatttttttgatcaattgatagccattcatttttggcatcatgatatctaaaatcgccagatcaattttttcttgctgaatatgtgcccatgcatcttccccatctgttgcggtaaaaacggtgtagccgtctttttctaaatataaagtgacgaaatcaatgattccttgctcgtcatctgctactaaaattgagaatcccattgaacaacactcctttgctcatctattattctctattataccgttcaagaagctattttatatctactcttttaaaaagcagggaggttgatatcaaaatacaagcgatgattaagatggaagataaaagtgcaggaattagattttccgcttctccactaatcaaatgattgctgaccgacaacgctgaatatttcgcaaactcaaatgcattgctgttaattaaataattgaccgcaaacaaactaactaatgaaaggataaaggcgataaaaggagatagaaataatcccgcaagtaaagcaattgccataaataatgctaggtgtaaaaggataaacccaatcattgctactaagttaggaaaatcaatcgtcgcagaagagaagctcgcatttccgatagaggaattggcaacaaagagatagtaactaccaaccgcagtgagtgtaaacaggacaaaagctccaattgctgcagttgtaagagcaaaaaatttcgcgatgatgattggacctcgtttaccaattcgtagcaaggtcattttgatttgtccgctagtaatctcgccagaaaactgaaaagctgtgactaaaatcagtaaaatcccccaaattcccagcgtactgaaaaatccccacattgctgtaacaaagtcaagacaagcaaacgttccatcactagatatcccttcaccagtaaacgttaatccgcctgtcgaaataccaaatgccatgattacgatcaaaattgatgggatcaacagaattaaactattttttcgtttcaatgttttgattatttccattttataaatattccatatttccatgatgattcctcctatttcatttgctcaattaattgagcctgctggttttcaacgtgcgtgttctgatcagaatagctgataactccgttgcttaataccaaaatattgtcagtcaaatcgcaaacctcctgcatttgatggctggagaaaagaatcgctgtaccatgctctcgacagagtttttgtaacaattctttaacttcttccacaccaattgggtccaaacccacaaatggttcatctaaaatcaatagctctggttttgtaatcaatgatagggccaaagccaaacgttgcttcataccgaaagaaaaatttttgacctttttcttggatgcgttgctcagttccacaaactctaaactttccataatcatctgttttcttttttttcgaggaatcgagtcaattaatcgaatcgaaagcatcaaattatcataagcattcaagtcttcataaaattgaacatccactaatgaaccaattttcattttcgtttgtgtatctgttgtgtttaagtattgtccgttaaaagtcatctccccttgatagtttgccgttaatcccaagatacatttcatcaaggttgtttttccagcaccatttcgtcccaacaaaccagtaattttccctggcagcagttgcaaattaatcccttttaagatctcgttttgtccatagcttttccgtaaattattaatttctaaaatggttgttgttaccatgattctttcctcctcattgtttttaaaataggttgagcatatattactcaatcaaaatatttaagcaaatcttctgttcctcatgactacagtatagagaggaaaacttgcatagaactggacttaaccttaaagtaaccttacaaataaaataaaacgaaatagttggagctttagagataatcagttagtatttattaatttttatcatattttggtataattaatttgatataatcggatgatttttggtgaatgaaaaaagggatatggggtgaagaagatggcaaagtctttccaatatttgaagtcatttcttaataattgcggtataccaacgaagaaggcagaggctgacgcaattttatatgaactgattgtttcaataaaagtagatcccgcaccgaatttcattcaacatgaaaagataaaggacgctgtggattgggaaatttatggtgagggtgtgtataagggaagaactcatttaacaaaagaagaaataaaaaagctgctaacaaaggagttgtgtttagtagaagagaatgtgcttgtaattgatgtgacaaatactattgtaaacgcaaaaagtaaatagaaagaggaaaatctgcaggcagatctcctctttttaactgcttgtattattgaaaaaaaagccacgagccaatggcgataaaagataatgcaatgagatagacgaggacactggtacaaaggatgattaatttaccattttcattaagaatattgactttgaaaacaggtaaaaataaatcatatttgtgaaaaaggaagacgcgaccggcaacaatcccagcaacaattccgaataatagcagaaaaagcgaaaggctgatggtggacgtaaccttcagaaaaatggaagacgttaacatgacagcatagacatatttttccaaattgatcacctgattcctttaattatttagtttctccctttattatacgaaaatgaaatgtgaaactgctgcggattctgtatattttactgtcgttttttttactcatcataaaaaaaacgggaaaaagaaacagcaataagtgtaatcagcttgaaagacatcaagtaaaaaccgaacgagcataagcttctttaatgaagtgacctccaaatgttagacttttttcggagtagagaaatctactccgttttttgtttcttaagctaagcgattatgccgctttctgtgctgtttctcgaaactgaacagggcttttccagttcaatttctgtttcatccggtgattgttgtagtaatagataaaatcatcaatcgccgtttttagttcatcaaaactgtgataggtttctccatgaaaaatttcttgttttagaagactgaagaaattctccatgatggaattatctaaacaatttccttttcgagacatactttgaaaaattttctgtttctttagttttcgacggtaggctttcatctgataggcccagccttgatccgagtggaaagtgcgacgatacgggcaatcattcgtgatcgctatggcttcttctaagccttccatgattgccaaggcatttggcttttccgagatgcggtacgaaagaatctcgctattatacatatccataaacgggtccagatataactttctctgacggatcacgcctttggtatccacttcaagatatttgaactctgttgtatctgtcgtaattttttggtgacaaatagtcgtataaaagtgacgacgaatccggtgtttcgccactttcccgacttttcctcggtaagaactgtagcgccgtgatttccgcgtgtatgaacgcacttcgattcctagttttcgaatcaaacgttggactttctttttattaacatggaatccacgattctttagttcgttcgtcattcgtaaacagccataatttttatgttctttacgaatacgaagcatttcggcttcaatttcttgatcagggttttctctgtcaaatcgtttttgccagtacataaacgttgctttaggaaagtccaaggtctcaagaagctcaactaatttgaagggtcctcggaggctgtggatgattcgtgcgattgattcgttcgtctttgttgggcttcctgatttcgcagcttcctcagttcttttaaaaaggcattttctatctgaagtgaacggacttgtttttctaattctttaatacggtcgcgttcttccgatgttactttaacaaaatctttctttggcttttcttttttcttaggcacggtaggtggacgtcctttcggttttgagagtcccttgataccatcatctcgaaaactccgcatccaactggcaatcagagcatgattcctcataccgagtctattggcaacttcacgataggacaactcactcgtttgatataactctatcgcatccatcttgaattgaacagagtaagtattatcataatgttttcgaaagagtccttcctcaccaaattgttgataggaattaatccagcttcttacttgatccgcgttcttaactccatactttttcgctagatagcgatagccaccttttccatccaaataatcttgaacaactttcagcttgatttcaaagccatattcagtcataaaaataccgacctccaaaaagttagatttttggtctaacttttgggggtcggttcataatagaaggattatgctcgttcggtttctttttagaatggagcgactaatgaagatttttagtctgtcttcaaatatcgccacaatgatgttcggctgatccctagttgttccgcggtttttgtttggttgccattgttttgctctaacacgtttaagatgatttcttttgaataatcaaaaagcgtcggattttcaacttttgtttgtaaggtaaagcttcccagatgcgagtctgagaaatgttgaatcaaccgttctttttttaacaactgaatcacttgatgctcagaaatgtaatgagtggttgcattgatgactaattccttaagagcggattgtagctgattgaaatttcctggccattcgaaggctagaaattcttttaaggcatttggttcaaaaccaagtacatctttattgcattcgatgtttattttattcaacaataatgtagtgatcacactcaattcatgttttcgttccttgagaggcggggcgtagatactggcgcaatttaattcaaataataaacgattatagattttctcttcactagcattattggtattataggtgaacaacaaattatttctttgcaggagcttggtgtttttaacgattgtaatcagctgttccgcgtctcttactgaaagttgttcgatgttttgaaagagcagggtattatgctcatcaaccaatggaccattggtgggatttacgagaaatttccacattttttcattcatcagcttggcatcaattgagattagttgattattatgcatttcttgattcaaaaaggtctgataggcaatactggatttggcggttccggtctcgccgacgataatgatagaattgtagaaatttttgattcgttgcagatttctttttgtttcctcttgaataaattgagtaaataaaagctttgttgtaaaaatttcttccacctcagagcgcttttggtaaaaaatgccaaagcgattatttatgataggcggggtcgaaatttttagaatacagctatagtaggttcgctcatcaactattattttttttacattaagcatatagaccctgtttttaaaggtatgatagtattggttttcgtctgtcatatctttttttgtgtttaaaaatttggcgatcgagctggataaatcattcgacgtatttgcataatacacctgaaaggcctcatcaatgatgataaaatcctgtttttgatggtgaagactttcttccaagactgatttctcatgaatgactctttttaattgtttggcaatcgtcaaagcctcctggtaagcatgcttgatactttcaaaccccgaagtgatcaaaatagtattaattgatttcgtcagtgcgagccgattcgtgatggcgtcgcacagaatcatttcgtattgctcctcgattaagatatccaaggtcatactcgtatccgttgattcatctaatgtgatgattttaatcgtgtatcctaaaatatcacaaagcaaatgagccgtttcagtaatactggcgtagccgacaattgcgaaattttctgtatagtttttagctaaacgtatggttccaagaatatcgtaaatggaaattgagacatcaatcactggaattgagactacctgacgaattaaatcagcagttcctccacgagaaatgatcgcatcatagtcattttcaaacagctctgaggcaattttttgtccttctttcaaatcagctgtatagatgtcggattctacatcagtaaattgtttactgacgatactcatggaattatttagttcttcataaggagcaattcctaaaattttgatttttgctgacatgctttttcacctcttgtttcatattggaacaattatacatctttttatttaaggaaaacatcaaaacaaagaaaatgtttcaataataaacgattttttctttttttaaatatccaagggcaaggatgcaagctaaaatgaaaccatgaaatctaaggtggtgaacggatgataaagctattagttatcgcagatgattttaccggagcgttagatacaggtgttcaattttctaaacgaggaattccaacgatggtttcgactgatacaacatttaacttcaatgaaatgaatgaagaagtcgatgtattagtaattgatacagaaagtcgttacttaagatttgaagaggcatacagcttaattcatcggataattgtaagcgctaaaagtgcggatgtgcctttcatttacaaaaaagttgattctgctttgcgagggaatatcagtgctgagattaaagctgtgttagatgctagtcgagcaactgcggtaccgtttttaccagcttatcctgaaatgaatcgtgtattaatagatgggaatttatacattgatcaaatattagtttctgagagtgtctttggaaaagatccctatgagccagtgaatgaaagtaacgtattgcgacgattaaaaaaagaagcgaatattgatggcctcttaataaaagaaacatttccgcaaagcttcaacggtgttttactatttgatgctaaaacgaatgaggatatggagcagcatgtcgaaaggctgcaacagaagaatttgctgtcaatgacggtaggatgtgctgggtttgcgaagatattagcaacaaaactatttcccgaatatgaacctaaaaattattccttaaaaaaacctcttgtggtgatatgcggaagtgtcaacccaatcacaaaaaaacaggtcgattatgtagagcagaggaactatcctagaatttccttgacccatcaccaattgttacgctcaaattattggttcgattcagaaggaaaaaagaaggtggatcattatttatcgttaatggagaagcatccgctgattctctttgaaacattaagtaaagaaactagcataggaattgaaagctacaaacaagaacaaggcttagatatttcagattttcgttttaaaattggtcggtcattaggagaactaacgcaagctatttggtcgaaggactctgaaaacaccttcctattcacaggcggtgataccttgtttcagtcaatgagtgtgttagggatcaatcagataaaaccgctggtagaaattagtgccggtgtggttctttcctcaattatatggaagaatcgagaaattcaggtgattactaagtctggtggctttggaaatgttgaactttttgaagaaatcagccaattaacagaatagataagaaaatggaggaaataaaaatgcttgcagattacagcttaaaaatgccaaagaatattattgccggcgaacatgcaattgagcaactttcagatatccttgcaaaaggtgttcaaaagatcgtgatttttaccgataaaggaattttaggcgcagggctattggatttacctaaatcaatgattgaaaaggctggtgtagaatacacgatcatatcggagattccggcagaaccgaattatcatgaagcccaagcgatggtggaggaatttaagaaggaaaaagcagattttattattgcaatcggcggcggaagtgtgatggatgttgccaaactagcgtcaatcttagcgacagatagttacacggttaaggatttattggacaatccattattggctaagaagcaaattactagcttaatgattccaactaccgctggaacaggttcagaagcgactcctaacagcatcgttggagttccggaaaaggaattaaaaattggaatcgtcaatcctgaaatgatcgccgactacgtgattttagacagtcgaatgatcaaaaatttaccaaaaccgatcgcagcagcgactggagtggacgcgttatgtcacgcaattgaatgcttcacttctacaaaggcaaatccaatcagtaataccttcgcgttagaagcattggacttgattatgaacaacattattgaagcttgcaccaatccagaggcattagacgcaaaaagtaacatgcttttaggctccttctatgctggagtagcgatcacctcatcaggaacaactgccgttcatgcactttcatatccattaggtgggaaataccacattgctcacggtgtttctaatgcgatgctattgacaccggtgatgaaatttaatgaaccagcgatcaaagaattactggcggtggcatacgaccgagtagtaaaaaatggcgataaaaatttaacagtggatcagaaatctagttacatgatcaatcagctagaagaaatcgtcaaagtattggaaattcctactagcttgaaaacttttgatgtaccagccgaagacttggacggtttagtagctgcagggatggaagtaacacgcttgttagtcaacaataagcgcgaagtgacacctgaagatgcaagaagcatctatttagaaattttataaaaaggaatggggcagaataatatggtagaaatcaaaggaatcatttctccaattttaacaccaatgaaaaacgatgagagtgttaattatgaagagcttcgtgtgcaaatcaatcgactaattgatggtggtatccatggaatctttgtttttgggaccaacggcgaaggctatattctttcagaagaagaaaaaattgaaatcatgaaggtggcagttgaagaggtaaacggtcgcgtacctgtttatgcttcaacaggacttgtaggaacaaaagatacgattcgtttgtcacaaaaggcgaaggaggttggtgtggatgtactttcaatcattaccccttcgtttgcggcagcatcacaagaggagttgtatacccactttaaaacagtggctgaaaacgtggatatgccaatcgttctatacaatatcccagcgcgaaccggcaatgccattgctccagctaccgttggtaaattaagtacgattgacaatattattggtgtgaaagacagcagcggaaattttgataatattttgcaatacattgaacagactcgtgagcagaaggatttcgctgttctttccggtaatgattcattgattttgtggacgcttctagcaggtggacaaggcggaattgcgggatgttcgaacatctatccatttgttatggctcagatttatgaacaatttttagaaggaaatattgaaaaagcaagagcttatcaagattcgattcgttcatttagagattgcttcaaatttggtaatccgaatacaattgtcaagcatacagtaggactgttaggctacccagtcgggaaatgtcgtgcaccgttcaatcaagtttccccacaggcaacagaagcgttgaaaaaagtaattgcagaaaatcaagaaaaaggcatgaaataggatggaggaagcgaagtgaaaaaaatcgttggaatcaccatgggcgatccagctggaattggtcctgagatcgcgattaaaaccttgaacaaacaagcgttatatgatcggtgtcgtccgctattaatcggtgatgaaagtgttttgaaatactacttagaaaagcatccggaattagctctagctatcaatgtagtgaaaaagccaaatgaaggaaaattcacgtttggaacaattgatttgattgatttagctgttgtaaacatgaaagatttgccaattggggaggtctctaaagttggcggaaatgccgcctttcaatatgtaaaaaaagtgatcgaactagcgatggctaaagaagttgacgccactgttacaaatccactgaataaagaagcaatgaatgcggctggtcatcattatgctggacatactgaaatttatgcagatttaactggaactgaaaaatatacgatgatgctggcagacgggaatttgcgggttgtgcatgtttcgactcatgtttccttaagagaagcctgcgatcgtgccacaaaagaacgggttttagatgtgattcgaattgcgaatcaagcctgcaaaaatttaggaatcgctgaaccgcgaatcgcagtggcgggcttgaatcctcactgtggtgaaaatggtttgttcggtcaagaagaaatcaatgagatcaatccagccgtagaaactgctaaggcagaaggcatcaaagcgtatggttctttaccagcggataccgtgttttccaaggcgaacggcgggatgtatgacatcgttgttgcaatgtatcacgatcaagggcacattccgttgaaaacattaggctttgtctatgatcagaaagcaggtgcttgggaagcggtcaaaggagtaaacattactcttggtctgccgattattcgaacttctgtggatcatggtaccgcatttgaccaagccggaaaatggacggcaagtgaattcagtcttgaaaatgctatcgactatgcgattcgtttagccgagaattcttaggaggttgagaaatgattattgatgcagtagcaaatttgaaacattatacgaaattatttcccaatattcctgatgcgcttgaagcaatgaataggattgagcaacaggaatttggcaaaaagtatttcttcgagggtggtttcttcttctttcaagaaggagcgaccaaacccattgaagagacacaattcgaagcgcatcgaaacttcgtagatcttcagattgtcttggaaggggaagaatatatcgcttggaacaaaattgacgatttaaccgaagcgatcccctacaacgcagaaaaagatgttcaaaagtttacgggtaaagatacacataagatgaaaatatctgagggcatggcatacctttgctttccttgggatggtcataaagcggtttttcacgtcgatcagccgctacgctttaagaaagcagtcattaagttagcacttaattaaaaaggaagcactctggaaaaataagtgagcgactgccggtgaaacctagttggatgggatgcgacatgaatcgtttacttagtttttctagaagaaaaaataaacacattaataggaagaataaggaggaaaaagtatgacagagttaccgaaagtacgacaatctgaaccaaatggcgtggtttatcgggatgattttatgaatatagattttggattgattcccactggcggaaaagcaactgctcatgcacccgcattaattgaaacgaaggatggtgggatgttgtgtgcgtggtttgctggaagttttgaaggaagcggagatatttccatcgctgtttccaagttagaccctaaaacacaggtttggtcagaggcaaagattgtttctaagggtgaagatcgcagtgaacagaatccagcctttttcagagcaccggatggcgagatttggttaatttatacgtctcaattgagccgtcaagaaggcaaagataacatgcagtttacttctattattatggttcaaaaatctgaggatgagggagagacttggaaagaaccagaggtattgttcgataatgaagggaccttctctagacaagcaattcaagttttaagtaacggccgttggatttttagtacatggctatgtgaagattcaccagatggattgaccaatgatccaacggaatttcaagtttcagacgaccaaggaaaaacgtggaaagcggttcggatgcctgatagtaatgggcgagtacatgcaaatctaattgaagtagaagaaggacatttagttgcctttatgcgtagtcgatttgcggatcatgtttataagagtgaatcgcatgatttcggtgatacttggtcagttccagaagcgaccatgctaccgaataataatgcgagtgtcagtgcaattaagctgcaatcgggtgaaatcgctttagcttataatgtgaacgctgccaatcgtgcggaattcggaaaagtggcatggcctggcttacgaaatccagttgctgtttcagttacagaagatcatggtaaaacttggccaatcggcagagtctttgaacccgctgaaggctatattggaatcgaaaataaaacgaataactcgcagcacgaatatccgacactttatcaagacagcaatggggtgttgcatttggtttatgcctacaagaatcgtttgtgcgtgaagtacgttcgttttacagtggaagatttatttggcgaaaaaagagaagcagagggtgtctataatccaacttcgggtgaaggcgtctaaccgaaaaaaataactatttgaagtttccagcatcagtgtgttgcgctgcagagcgaccactgctcaggacttagaattacatttactgctgatacatagggcgttgatcttacttatgtatcaacagaaagtaaaaaattatttcattttaacaaaaaaggagaatacaaaaatgacaatagaaatgattctcgccctgggtattttggttttcatgatcgttttgatcatgtctgacaaattggcctttggcgctccacctttgttggcctgcttgttattggttgttactggtttatcaacagttcaagaggcttttgcaggatttgtaaattcaagtgtaattatggtagcaggatttatggttgtaatggcaggtttaatgaagaccagtttgattggcagagtccaatccacgatgatttctttggttaatcgtggcggctataaaagttatgtgttactgctgatcgtggtgatgcttggtgcaagtctgacaggttctggatctactgggtattatgttcttattttatcgttagtatcgatgattccttataataaaaaaatgcctacatcaaaattaatgatgcctttaggttttgcgacgaaccatccgttactgccctttaactgcgcgttattttatggcgtaactgtcagtgtgttagaaacggcggggtataaagagacgatctcaatgccgaaatttgcaatcgttaacttcattttagcaatgggtttcctagtttggagtttgattgcttatcgtttattaccagatcatccaattacagaaccaggagaagaggataaaaaagaagaagctgaagcagtagtattgccggcgtggaaagaaaatcttacgattgctttattcatgttaagtgttgctggcatgatgatgatgaatacattaggtgatgcttcttatgtgattccgggattagcaggtgctatcctcttagtaatcaatgtgttagatttcaaagaagtgcgtgacagtatgggagcaccagtaatcttgatgatggctggtgttatcggagtggcagatgccttagcaaatactggatttacagcgatgatcggtgatttagtggcagatacgatcggaacgaatttccatccattcttcttagtgttgatcttcgctttattaactagtacttgtgcaacatttacgggttcaaacatgggatctgtttatattttcgctccaatcgcgatagcgacaacgattagtttaggtttaagccctgttgcagcggcaacagcagttgtgatctctggttggaatggagggtatatgcctgtagatggaatgccagccatgatcatggggatgggaaaatacaagctgccggagttctggaaatattcagtgcctatgtatctgattcgaatcgttgcactgacaatcggatcagtcgtagtctttccattttaaatgaagtaattgttttgtttggattgaccgttctacattagaattttaatttccacataagggagtaaccagcagtgtaacagctgtgacagtatcaccaataacgaaaaaatttttctggtgctgtcttgaatggtgagacttgtgtatgcctttttagacatacacaagtctctttttttaagaaaaattaggaggaagttatgacagaaacgaataagaaacaaagtacaacagcattttatgcggaagctacagaacttgttttgactgaaatgcagacatcaagcgatggattaagtaataacgaggcaaaaaaacgtttagcagcatatggaaaaaatgaactggctgaaggtaagaaaaagagtctattgatgaaatttgcggaacagttcaaggattttatgattctggttttacttgctgctgcaatcatctcagcaattgtatctcatgaagttgttgattcaatcatcattttactcgttgtgatcattaatgcgatcatgggtgtttttcaagaagccaaagcggagcaggcgattgaagcgttgaagcaaatgtcgacaccaaatgctactgtcttgagggacgggcataccttatcaatcaaaagtgatgagctagttcctggggatattgtattactagaagcgggagatgttgttccagcagatattcgattattagaagcggcttcattaaaaattgaagaagcggccttgacgggtgaatcggtaccagtggaaaaagaaacgggcgtattaccagctggtgatattggtattggggatcgtgtaaacatggctttttcaaatagcaatgtaacctatggccggggtaaaggtgttgtagtgaacactggaatgagtaccgaagtcggaaaaatcgctgatatgttggctcaagcggacgaaacagaaacgccgctgaagaataatttgaatgatctgggtaaattcttgactatagcgataattgccatcgcagtgattatgtttatcgttggaacattgatcaatgggacttctttcgtagacatgctgttgacttcgatttccttagccgttgcagcaattcctgaaggattaccagcaattgtgacaatcattttagctttaggaacccaagtaatggcaagacgtaattctgttattcgcaaattaccagctgtggaaacgttaggaagcacggacatcattgcttcggataaaacaggaactttgacactgaatcaaatgactgtagaaaaattgtatgatgagtttcagcaaaaatcggctaaatctactattggaacagacgacttagcgataaaaatcatgaattacgctaatgatacaaaatttgctcaagatggaacattgattggtgatcccacggaaacggctttagttcaatttgggattgatcagaattttgatattcaccaaagtctgaaaaaagagcctcgtgtcggagagctcccttttgattcagatcggaaactcatgagcacggttcatcaacttgctgacggaagatatctagttgcggtaaagggagctccagatgtcttaattcaacgaacaaaacgtgtatttgtagctggccaagaacattccatgacggaaaaacaaaagaatgaaattctgtttaacaatgctgatatggcgaagcaagcactacgggtgttggcgatgggcttcaagtatttagacgaactcccacaagaattgacgtcagaaatacttgaaaatgatttatgctttgctggattagtcgggatgattgatcccgaaagagaagaagctgccgaagcggtgagaatggcaaaagaagctgggattcgacctattatgatcacaggagatcacaaagatactgctgaagccatcgcggttcgtctaggaattattcatgatggaaattccaacgctgtcttaaccggtgcagagctgaacgagctgagtgatgaagagtttgctaaaaaagtgtacaactattctgtgtatgcgcgcgtatcgccagagcataaggtccggatcgtaaaggcctggcagcaagaaggaaaagtagtagcgatgaccggcgatggtgtcaatgatgctccgtcattaaaacaagccgatatcggaattggtatggggattactggtacagaagtttctaaaggcgcctccgatatggtactggctgatgataattttgctacgatcgtcgttgcagtcgaagaaggtcggaaagtattttcgaatattcaaaagactgttcaatacttgttagcagcgaatttaggtgaagtattgactttatttattgcgaccttgtttgcttgggatactttgttgccgattcacttattatggatcaatttagtaactgatacatttccagcaatcgcattaggaatggaaccagctgaaaaagatttaatgagtcataaaccaagagggcgcagttcaaatctattctctggtggagtgttcagcagtattatttatcaaggaattttagaaggcgggattacgttgtttgtttattggtttgcgattcaaaatccagcgcatacagcgttaaatatgccggaattatccactcaggcactttataatttgcaacatgcagatgccttgacgatgtgctttgcgacacttggatttatgcagctattccacgcctttaacgtgaagtctgtgaagcaatcaattttcaaagtagggctgttccgtaacaaaaccttcaactgggcgattttgctttcctttgctctgatgggtgtaattattttggtaccgggactaaacgatatttttcgtgtagcttctttaaatggtatccaatggagtgtagttgctggagcgtccttctcaattattccgattgttgaatttgtaaagttttttcagcgaaaagtttctgctgaaaaagttgaagaagcagtaatcgagtaaaaaaacaggcagtgtgtcagaatttagatacgctgcctgctttttatgcactaagctattttttgggacagacatatttcattgtcatagtcccgacaattatcgtatttacatagatttgttcgatgattcctgttactttttctccatggcagtctacggtagtaatttcattaccaataacatattccattaatcatccatccctttcacctgacatcctaccactgattaaggaatcattctcttcaattatttattatgaaacgaaattattaatagtgcgtatcatttgttattttacttttttagatgattcatccgaaactaaaatctagtaaagaaaaatacaattacacacctccttagtcattgactgattggtatactcagagtgtaactaaatgaaagagtgatttaagaatgaggcgcatctgaggattgttactcatttagaaagcaatgaagctaaagacttttgagaaatccttcacccgatttgacgatacacgctataatgggtttaataaaagaatgattaacaggatgagaggtgattccatgaaatcagaaaaagagacgacaaattcgttgattgaaaatcgagcagcttccctgcaaactacctcaaaggttgtgctgccaccatctctagctgaacgaatagaacgttatccagaaaataaacggcggcccgttaataaaacggtttttaaaaatgattattttcaattgacctacaatacaagaaatcaatctatggcaatttcctcaaaaggcgatttagtctattcagcgattccttatgatacagctcgaaactatatccaacgtgccgcgatccaatacttgcttcatccagaagaaattcgacgctatatcgagcttcatcagacaacaatagagaaatatttgatgttgagcatttttcaggtgtctggaaatcgtgtggatgataaatcatttgaagtaaagcaggcttataaagcgatcctgcaaaatccgttattagaaattcaggttgctggacgattgatgcaacacgatgaaaccggaccgttatcagcgaatctggccggaaaatttctttttagtgaaaatataaaaaccggaattgcaggctatatttctgagtatttgaatttcgttgttcagctggctaattcattgccattgatgatcgatggaaaagatgttcagttgttagatgcagtggagcaagatcaactgctgatcgacaaaggactgacgatatattcggatattgaatcggcactttccttattgcctcaagaagtgaagcatgatgttgaacaggctctagctgttactgattcagctcaaatggtcaatactcaaccgcttctacgctctcaatatggggaagaactctcccgaacgcgggaaaactatgttgctcacagtgtccatcccgatgaagcagagaagtatttcaaaaacgtccattccactgaaaatcgtaatctgatcaatgtggtttcagatatccatgcgcaggatggaaagttgccatttgttaatcgacattttaatgtgctggtcggtgatgtgtcggattctcatgttcaagatgaagaaattgaagggatctatgtgataggaggacatgaactaatggatgttctacctgaaacgaccgatgtatctgatgagcaatgggataagtggcgaccgtttttcaactatgaatggtttaaggaactaatgcaagaaacggatgaagcgtggtatttattaccgactggtgagcatgatttttatgaagtggtcaaaacggaaatcactagtcgctttccaaaaatgaagcttttgaacaatgagtatcttatttatgaaggtattcgttatgtcggtttgacaattcctgttgcgttagtgagacgaaaagaagcgctgcaacgattcattttaaacgcgctggaaaaaatcttaggcgaggacgtggatacacccactgtaattgtttctcacgcaccattgttcaatgaactgagcctactgccagaaacaagcgatgcatataataaagattatgtttgttcagaaccacagatagaaaagctatttgaaagatacaatattatcggcgctattcatggacatcatcatatcccggcatcttcaagacgcttcaaaaatgttgaatttgctggaaaacggatgtttgttgtgtgctcgatttattcaaaagtaaataccgggtttgaattaatgagcttattagaatgcggaaaataagtgacagaggagaagaaagattttcgcctctgttgatttttacgattattcaaagataatatatttgttcgtatatagctttatccgaatatgaaagaatgtatggaggaaatctatcagagtcgtaatctcaggcaatatcacttttcaagagtaatatagaaatttattaacagaacttgctaacgctggatttgacgtaattgactattcacgagaaactcaaaacttagcagaggagtatccgcaaattttgatgggattttataaaaagatagagatcactgatattttttccttatttaatcaagataagagaggattttcgtcgaaagatcgctgtacttcaaatgagtcgacggatttagaaacaagtaatgagctgtgacgaaatttttgtcacagctctttttttgatttttataaaaaatcttgaatcagcttcttattttccggtcttttatcaatttccagtttggcgattttgtggattaacatatcaagcgtaatctcattcatttcttcttctacttttttctgcagcgcatcgtatttttcgctaagcacttcttgaatatttgcgccaacgatacaattcggatttgttttaggatctacttgaatcaagttcgtatttccctcaatacttttataaatttctaatagcgtgatattttccggtcgttttgcgagagtggggtttggttttccgatttgtgtgaggatcagcccagatttttttagttggctcatgatttttcgaacatttgctggattcgtttccacacttttagcaatcatttcactagatagcgcatcagttcctttgcagatttcaatataagcaaggatgtggatggcatcactgaattgtatcgagtatttcatgacctcagctccttttgtaattttctttcttgacatatcttatcatactacttatgattataggtgtaaattataaatgtacagcaaaagaaaaggagcggatcatatgaattatttagtaacaggtgcaactggaggattcggaaatcatgcattggacttcttgaaaaaaagtatttcaacctcggagatttttgctttggttcgaagtgaagcaaaagctgaagctttaaaaagggctggtatacatgttcgaatcggtgattatggggataaggaggctatggaaagagtatttgaaggaattgatcgtgtgctgtttgtgtctggtgctccaggcaatcgacagaaggagcacgcaaatgtggttgaagcagcaataaaagcaggagtatcttacattgcttatacaagttttgctgaagcggacaaagcaactagtcctttagctgaggatcatctttttacagaacgattgattgaaaaagcaggcatctcgcatacatttttgcgtaataattggtatttagagaatgaattgccgttagtcgaagcggctatgaatagtgggaaatttgtttatgcggctggaaatggaaaaacaggttgggcgatgaaaagagaatacgcagaggtggctgcaaaggctctactaggagctgactatccagccattttagaactttctggaaaaccagtaaactataacactttggcgaacgcgctaaaaaaagcgacaggaaaagagtttgaagtaataagttcagatgattcaggttttattaatcatttggttgccaacggaatgcctcaatcggtcgcagaactatttttatctttccaatatgatattaaaaataatcaactagatgttacttctacggatttcgaaaaagcattaggcagaccactaatgagtttggaagcaggatttaaagagcttttgcattgatggatacacagacttttttgtctaagcattataaaacagctagataagcctaaaatgactattccttctttggaatagtcatttttagtaaataaaaaacttgtatggagatactaatcagaaatgatttcatacataatggcaagatcttccgccgccattcgaacctttgatttttcaatcaaaatatttttaccagtcatgatgtaagagggcatgattcggatattttgatagtaaagttcagtgtttcgcaatttataggtggagatagctgggacaatatttctttttgtagactttttggtgatccgattaaagcatttttttgcgacatcgcccatcaacataattacttgaacatttggaaaaaggttcaattccttttctaaataaggcaaacttttttcgatgctgtcattagagattgtcgtttctgattttggaatttttatcgcgttagttagataaataccgtaagacaatatgtcttgaatgtttgtaacctcgataccggctttttgaaataatggtattgtagtttccatgtaagcagcatcttctaaaccgtagaaatcattgtttggatcagcaggaaccacttcgttaatcataatcgcctttattaattttggatcgatatcaatatcgtttaaataaatctggtcattttcatctacgtatttctcaatttcttgtttgatattcattttgtgacctcctttagtttagtatacaaaagaaatcttgacagtgagtgtccagtttagattgattgccaaaataattgagcgatgctggattttgatgacaatgaacttatcagctgctaagcagattattttccttcataaaataatcgtgttagggtaattttatcaactgataagtggaggtctttttatgtttttagcgattaatgaaatcaaacattcgaaattgcgttacacgttagtaatgggagtcatgtttttgattgcctatctggtattttttttaacggggttggcttatgggctggcgcaagataatcgaacagcagtagataaatggaatgcagattccattcttttaacagaggaagcgaataataatctcaatatgtcaatgataccgctgaaaacttttgatgatgtaaaggcagatgaaaaagcctatcttgctcaaacagcgggagtaatcaaaagtgatgggggagaaaaaattgatgtcagcttttttggtatcgataaggatcaatttctggctccaaagctgactagcggaaagatgttttcttctgataatgaagcagtagcggaccgttcgctaaaggatgaatacaatctgaagctcggtgaaactgttaaaatggcaggaaacgataaaacattaaaaatcgttgggttcacggataatgcaaaattcaatgtagcaccagtattgtatacaacgattggtgcgtatcaggaaattcgctttgaaacacaaggaactagtgaaaacactcgaatcaacgcgatcattactagaggagatgttcaatctgttccaaatgatttagaggagacggacatcaagagttttatcaatgatctaccaggttacagtgcacaggtcttgacctttggatttatgatcggtttcttgatcgtaattgttgcaatcgtcataggaattttcatctatgtgttaacgatgcaaaaggcagaaatatttggtgtgatgaaggctcagggaatttcaagtcgctatatttcaaattctgtaattgcgcaaacattcctattagcgactgttggggtagtgattggattagcagctacgttaggaacagctctgatattaccagatgcagtgccatttcaggttaatatgctgttctttggcggaatcagcatattgatgatcttagttgctttaattggtgcgttcttctcagtgcgaaccattgtaaaaattgatccattgaagacaatcggatagggggaagaaaaatgagtgcaattgaatttaaacgagtagaaaaatcatttaaagatggcgattcaacgattgaagcgttgaaggaaacaaatttttcagtggaaaaaggggagttcgttgccattattggtccgtctggttcgggaaagagtacatttctgacgattgcaggcggtttacaggctccttcggaaggagaagttctgatcaacgatgatgatttcagcgaaaagaaggaaaaagaacgggcaaaattacgcttcaaggaaattggttttattttgcaggcatcaaacctagtcccgtttttaaccgtcaaaaagcaattaaagctagtcgacaaagttagtaaaagtgataattcggaaatggcggaaaaattattcgagcaattggatatcgccagtttagaaaataaatatcctgaagagctttctggcggggaacgtcaacgagtcgcgatcgctcgggcgttgtatcatgacccaacgattattttagccgatgaaccgacagccagtctggactctgagaaggcttatgaagttgtaaaaattttagccaaggaaaccaaagaaaaaaataaggcgacaatcatggtcactcatgatactcggctggtgaaattctgtgaccgaattttagagatgaaggatggagaattaacagaaaaagacatttcagaagcgaacgaataaccttatcgcgtataatgatggtatcaaataaaaaagaggcgattggatgtatgaagagattttagatgttgctgaagaattatttatgaagcaaggctataatgacacatctactaggcaaatcgcgaaaatacttgagattacgcaaccaaatatttattaccatttcaaaaataaagaagaaatctattttcaagtaatgcagcgattggcaaatgaagttgggaaaaacctatcagagctttcagctcaagatattagttttgaagaaaaaatcttggcaatggctttctatttacaacaaaggcatcctttcagcctttttatgatgatgcatgatattcagcatacgctgagtcctgaaacagctcaaaagttatttgtactttggcagagctcttataaacatccttttcttaaggtatttaacaatgaatctcaaataagggagacggttgatccgaattttgctgtgagtcaattgtttatcttgatatccgcttacttggattcacctgtgaatgtgcggcaagaaaatctggagaaagcaattcaactttttttccatggtgtattaaaataacgaaaaaaatcccactgtcatcttcgacagtgggattttgcttaagctaagacagctgcgatcatgtctggcaattcttttttcatgacacgtttggtatttagtgcatctgtataagtaacagtttgatctgctgcgatagttgccaataattgacggtctttcttcggtgggttataaaatacctcgatcgctttatcagcatcagaccattcagcagagtaatttgcttttgattttaaagattgattcaatgcttctgcttggtctgcggttacatcagcactaacaggttccttgactacatcagccaagatatcttgagcaagctccgctgctttgtcagtatcctcactttcaacaacaggttctgatgttttaaaactttctgaccataaattatagatgctgttggtcaattgatttaaggtatttgtttgtggtttttgaatatgagcattgactaattctctaaaggaatggtcatgctcagcactttgaatatggcgagtttttccatcaggagttgtctcatcaaggtggatttgatgtgtgttcactttatcaaaatagatttttacatcactgtggatgtgctcactcagtgttttttccacttgagcaaaagttttgttgatttgtttgttacgaattttgagtgattttttgatactttttaaattcacgagtataattcagtcgctttcttttaagagttgtactaatccgttagtattatagcatacttcgtgaaaaatgcagtaggaatacgataaaataggttatttgattcaaaaaaagcgactttcaaataaaatattgagtaattcaatttaaaaatgcttaattttttagcatacgatgactgttagtgtggaaaaagggaaagaacggaggttaaaaaaaatctcagctgcttttacctgaagacagctgagatttcttacttatcttaaatcatctaaaaattcagttttaccaggatcgatttcatccttcatcttgatgatcttggcaggggtgccagcgacaacggctccagctggaacgtctttggtaacgacagcaccggctgcaacaacggcatcttttccaatatggactccctctaaaacaacggcattagctccgactaaaacattgtcttctacgacaacaggtgaagcactaggcggctcaagtacgccagccaacaccgctcctgcaccaatatgggcatgtttcccaacagttgcacgtgcacctaaaatagctcccatgtcgatcatcgtgctttcaccgatggaagcaccgatattgataatggcccccatcatgatgactgctttatcaccaatctcaacacgatcacgaatcaatgcaccaggctcaatgcgagcgttaactgatgagatatccagcattggaattgccgaatttctgcgatcgctttctacatgtacatcactgatctttccttgatgctcgtttattacttcttgtaccgcttgactttcaccaatcaagatccaggtttgttcttgaccgaaaaattgaactttttctttggtgattcccgctaagtttccttgaacataggctttcacaggagtcgttttttcggcatttttaataaatttagcaatttcataaggatcggttaaagtcattgaatctgctcctatctcatactaaggtaattatttttcaaaaggcgaaaaataagtttgattttcgccacgtatatcatccaactaaagatttagaattaaaatagacaatgatttatgtcttaatagcaattcaagtataactgccaaaagttggactgacatcctatctcatactaaggtaattattttgtctcgtttgttatttctcatcaatcaatttttccatatcgtacaaaccagtcgctttatcactgatatattttgcggctttaactgcgccactagcaaagatatttcgggataaagccaagtggttcaactcgatcacttcatcaggaccggcatagattacggtgtgttcaccaggaatcgtaccgccgcgaacggcgtgaatacctaattctgataacggattttctaaatcattgccatggcggccataaatataagttttcttttcctctaccgcgtcatttaccgcatcagctaataataacgcagttccgctaggagaatcctttttctgattgtggtgtttttccacgatttcaatattgaattcttcctctaagacgggtgtgatttcgcgaatcgcttttgctaagagattgatccctagagacatattggctgagaagaagacggccgtttgttctgccgttttagctatttgttcttttacttcatcagtcagaccggttgtggctacaacaacagggattttcttttctgcacaataatccaaaacagcagggactgcggtatagtgagaaaaatcaatgactacatctgcatttacctgacaatcgttgattgcttgaaaagtaggaaagtccgcttcgaaggcttcacgatcaattccggcaacgacttgcatattggattgatgcgcgatcattgtctgtagaacctggcccatgcggccattggcaccatttaagataatatcgatcatttagcaacctccaatccataagcagccatttcctttttcaatccttcaacggtttcgtctttcgctgcagaaagtgggagacggaagtttggttcgatttttcctaataaactcacacctgttttgactggaataggatttacttcgcagaagatcgcatgaatcaatggaatttgtgctaactgaagttctttggcttttgaaaagtcgccatctaataaggcttgtgttaattcatgggtttgccgtggggcaatattggcgattgttgaaatagagccttttccaccaagggccatgatcggtaagacttgatcatcatttccagaatagatcgtaaaatcgtctggcatgattcgtgcaatatcagcaatttgtgagatattcccactggcttccttgattgctaccacattaggaatttcgcctaggcgtttcaccatttgtggtgtgatattcatattagtacgtgaagcaacagaatataaaataatcggtaatttcacgctttcagcaattttttgataatgtaaaaagaggccttcatctgatgctttattataataaggagtcacgatcaatagagcatcggcgccaactttctcagcaccagtcgataattcgatggcatgctgggtatcgtttacaccagttccggcaataactggaattcgtccgttcacctttttgacgactgtctcgattacagcaatatgttcgtcattggctaaagtggaagcttcgccagtagttccgcaagcgatgattgcatcggttccttcactgatctgccactcgactagctcctctaacttcttgtaatcaacagcaccatcggctttcatgggcgtaactagagcaacaccagatccttcaaatattctcaagggaaacaactccttcttcatttttttcaaagcctttgtaaaaaggtctttaatagtagaattatatcttaattatgagtgcctgccaacgaaaatctcatgaaatttttaatcaaagaaagtcaaaaaaacaaggacgtctaatgtccttgtaagtttagttgatacattagccatagatcaagactaggaatcactagataagacgtaccaatcttggtaccgaagaggaaaaaataggtaaggctaccaagaaaataaacgatcagttctaagcaaagtttcccgttgccagtcagaacagttggggattttggcgcaccatatctcgcccaaactagtgtgatagtaattgttaaaacagcgaagagaattcgttgtaaaataccttttttgataaagataccactaaaaagcccgccagctgttgcgatttcaagtaaaaatcggatacccaatacaatactagccaaaaacgtgcacctccacaaaaatttctatcattataagtagtagaaaattctaaaacatcaggaaaaaacaatcaatgtatggacgttttaaagaataaatgcgatcgctacaaaaagataagtccagcgaatatctttttggcagagaagatagatacatccggcaactactgaaaaaaagatcgtatacaatccgccactgaacccttgaagaagaaaatgaattaggccccaagtgatcgcaagtagtaatcctccactaggaaatcgctcagacaatccaaattgagattcgaaaaatttctgaccaaacgcgatgactaatacaatcaaactacattctgcaaaataatagaatagacgaaaaataaaggcaataatacttttcttcagttccccattaaactcgacgactggtttgaatccgccaaagccgattgtagaaactacgatcacagaaaatactaagcaaataattagtataagttttttattttccagaggccgagaaatgctaaaaacatcaaaattaaagcggctcttcgcataatgaattaagaaaatagaaacaactgaccataaaattgccgtcaatccggcatttacagctagactcaaaccactgctaaccaacccaagaagcaattccaaactaaaccctgcaaaagcataaagtgccaaccataaaaagtcgacaggcataatctttttttctttttccaattttgttcctccaaatttctttttactaagtgtaccaagtaattaagggataggtactaaaaaattgagtaaggctcaagagaacaatgagaggagatcaaatgaattgtaaatttttagaatttaaaatcacaattactcgtttaaacgaaagagaatcatgtattaattttgaaaaatttcaaaaacaaattaatgaccgctgatgcaatctgtactataatatgagaaactatcaatgattttctaatcaaaaaataggattatgagaatttttatggaaatgagtgagacgatgatcgatacggaagtcaaagagttagaagagttagtcactactatgcgccgcgaattgcaccaaatccccgaattaggattggaggaaaagcaaacggcagcgtatattcgaaagaagttggcatcctttggtgtcacagagacttatgaagtcattgagacaggtacgatcgcggtcttacacggcaccaaaccaggtaaaacgttagcctttcgttcagacattgatgcgttgcctgtagaagaacaaacgggctatgattttgcttcaaaaacacctggaaaaatgcatgcctgcggtcacgacggacatatggcaacgctgctaggtttcattgcctatttacacaagtatccagaaaaaattcaaggaacgcttgtctttgtctttcagccggcggaagaaggaccaggtggtgcggaattaattatgaagtccggtattttacaaaagctaggtgtagaagaaatcgtgggattgcatgtctttccagatcttccagcaggaaaaatttcttgtcgaccagggccaatgatggcgcgtaatgctgaggtgacgatcacaatcaagggcgtcagcacacatggcgcacagccgcagctcggagaagatgcaattgttgctgctggcggtgtgattactggtttgaatagtattttagcacgaaatatcggaccattggataacgtggtgttgacctttggaacaattcacggtggcgaggcgatgaatattgtcgctaaggaagttgttttacacggaacaatgcgggcctttgatgatgccgtatatgaggaagtcgttcgaaggacggaattagtagccggggaaattgctaaaggctatggctgtgaggcagtggttgatttcaatcatatgtatcgagtcgttgataacgatccggaaatggtgaagaaattggaaaaggttgcggctgattattacgtggaaactccaccatatttaatcgcggaagatttttcttggtatcagcaggagattcctgggatgtttttcttcttagggattcgtgatgaagaaaagggctatacgtatccgctgcatagtggaaaaatgaaatttgatgaggtaaatctgttactagggattcaaacctatgtaaacttaattgctggattgaacgagaattaattgagggggcttacgatggaatttgaaactaaaaatggtcatttaatgtgggatggttgcgatactgttgctttagcagagaaatttggaactccgttatatgtgttttcgcaaaccatgattgaagagaagtgccaagaactgcagcgagattttgtcgaaaaatatgagaatgttcgtgtggcttttgccagcaaagctttctcaacgcttgcgatgctaaaaattattgaaaagcaaggcttttctttagatgttgtttctgatggtgaattgtacacggcgatcaaagctgattttcccgcggagcatattgaaatgaacggcaacaataaatcaatcgaagaactagaaatggcgattgattatggcgttggtcgaatcatcatcgacagtctgcaggaggttgatctgattgcggcaatcgccaaagaaaaacaaaaagtagtggatgttttgttccgtatcacacctgaagtcaatgttcaaactcattcatttatttcgacaggacaaaaggattcaaaatttgggattccgatcgatgaggcgatcttgttcccgcaaatcgaacatgcgattgaaacaccagaagtgaattttttaggttttcatttccatgtaggtagtcaattatttgataatcatgcccatcttgcagcggtagaaattgctttagatttggttaaaatggtaaaagaccgttttgactatacaatcaaggaattgaactttggcggcggtttcggtgttcgctacacagatgcagatcagccaaagccttttagttattttacagatcctatgatggaaaaagtattggctttttgcgaaacagaaaactttccgcagcctgcagttgtgattgagccaggccggagtatcgttgctgaagcagggatcagcctacacaaaatcggagcaatcaaagagcttcctggattgcgaaaatatgtcagtatcgatggtgggatgaccgataatattcgtccgggactttatgaagcggagtatacagggattttagccaacaaagcagatgttaaagcaacggaaaaagtgacggtttcaggtaaggcctgtgaaagtacggatattttggtcaaagatattgagctgccagtggttgaagctggcgatatttttgctactttttcaacgggagcttatggctattctatggcaagcaattacaacaaattagcgattccagccgttgtgttaacaaaagcaggacaagccgaaattatcgtaaaaagacagaccttggatcagatgattcaaaatgaagaaattcctgaatttttgaaataaagactcttgaaatgaggtggatgaatgaacattcctttttataaactacaaggtgcaggcaatgattttattttgatcgacaatcaagaactgaactttgccagtgaacaattgaccaaatttgcggctcgtgtttctactcgtcgtgtctccgttggagcagatactttgatcgcggtagaggcagcccgcggatccggtgatttttatgctcgctttttcaatgcagacggttctgaagcagaaatgtgcggaaatggtgctcgctgtgtggcgcgctgggcctttgagacagggatagctaaagaaaaaatgatcattgaaacgatcgcaggtgatgtgccagcagaacgtttggacaagaggacctatcgcgtacagttgaactcaccaaccgtttttgaagcagacaaacttcttcaggttgatgggaaagaggtaaccgtggattatgttgaattgggaaatccagggattcctcatttagttgttcacgtaccggatttagctatgactgaattagaaacgattcttgattttgcaagaaaattgagaattcatcccgcctttgaaaagggcgctaatgtgaatttctatgatatattgtctgatcaaacggtggtagagcgcacctatgaacgaggtgtggaagatttcactttggcctgcggtaccggaaccggctcaacggcatatgcattgactaaaaaaggtctggtcaaaagtgatccagttgtgatcgaagtcttaggcggacagcttcaagtgaatgttgtcgagaatgacctttatttaatcggtgatacgaatatggttgtcaaaggaacaattttagatgaagatttagcgtaaaagaaggtgaccgagcgtggtcatctttttttggttcatacgtataaatagtcttagacggggcttttttgatgatagcggtttaaatcttgcttattgacgcagaaatttgtaggacgtatcatgagatgaatagagttacttaggaggccgacatggagaaatttaaaaaaatggtggcgatcgagccaaccaaattattacctgaatgggatgaaaaactcaaggatctagcagaagaaacttttttttatgaggatattccgacggatgcagcgacaattatcgatcgaataggtgacgcagattgtgtgatgttgagttttaccagctttattgataaggaagtcttagatgcttgcccgaatattcgttatattggaatttgtgctagcttgtatgcgccagaaaatgcgaacgtagatattctccatgcagagaaaaaagggatcgtggtaacaggcgttcgtgattatggcgatgaaggtgtgaaggaatatgccatcagtgaattggttcgtttattacaagggcgcggacctgcgatgtggaaggatgagccaatggaattgaccgatgtcaaagtcggcattgtgggcatgggaacagtcggcagcttattggcgaaaacgatgaagttctttggtatgaacgtcaattattatagtcgaacgcgcaaacctgaaattgaaaaagaattgaatatgacttatttgtccttagatgagctgttagagaaggtagatatcttaattacttgtctgaataaaaatgttgtcctattagatgaagtagcttttaatcagtttggcaatgggaaaattttgatgaatgtttcgattgcgccgtctcatgaagtgccagcgctaaaaaaatggttggcagaacctgggaactatgcgtttagtgatactgaagcaggattaggcgaagaagtgatagggttaccgaatgtttttgccggaaaaaccaacgccggtctaacttcgatggcaaaagttcgtttggctcaaaaagtcattgcaaatattaaggaatttcaagcaaatcattaatggagattttatgaagattcaagcgtaatgtcgtttgaatcttttttaatgtccaagcgtatgtaaagaaatattacgtgaaatgttgcttttttcaaattatttttatctcatgtcatataatattacattggttattgaaattcccttgaaaactcgctatgataatacaaatgatggttgcgtgttttgaaaagaaatggggaaaagatatggaatatcaatacttagttcaggtagaaacgattgtcggagaaatgaccgaggaaacattcaatactcgtcgagaagcgctgtgctatgcaacaaattatgcaaaagttaagatgagcaaagtattcagatcaggcgagatattacatgagttcaattattaagcattgagaccataggattattgaagtttgtatagtgtttagaaaaaggctttgtctctatggacgaagccctttttttcgtacttgaatcaaatttccggcaacaaaaatcagaatacctaaccaaataaaggcaaaggcaatgaattgcggcaaggcatatggttcatggaataggaagattgccatcactagcatgatggtcggattcacatactggagaaaaccgagcgttatataagatagcttcttcacagcagttgcaaaaagtagcaaaggaattgccgttaccacaccggcccccattaacaatacattcgtactcattgaataattcatgaatccagtcggtgaaataaaaaacaaatagattagaccgattggcgcaataatcaatgtttccaaggtgatgcttgttgcagaactcaactgcaactgtttttttgttaatccatacaaacaaaaactagttgctaaaaaaagcgaattgaaggggaaaacaccggtttggagcgtcaacaatatcactccagttagtgccgaaagactagccagcttggcttgcttcgttagcggctcttttaaatagagagcaccagccagtacatttagtaatggattaatataatagcctaaactagcttgttgaacttgtccaattgacaccgtataaataaagattccccagtttaatgagacgaaaatcgccgctataataacagcgagaaccttttttcgattttttaaaagtactttgacctcttgaataaaagtcggcatctttcgtaatgcaatcatgtaaagcaacataaaaatcagagaccaaataattcgataaaacaaaatatcaatagagctgacaccacctagcagtttccagtaaagcggcaggatgccccaaagaatatatgcaccaaaaccataaactaacccagaatcttttttcatcagaacctccttgtttgaatcgtattttaccattttaacataaacaattgagagataatttgaaaaaaagggatttgatgattataaataatatgtgattacgaaaattggattaacgattttgagcttctttgattgatttgaaggcattgataccaaatgaaattagaaaaaagaagcttgctagttttaagaccgcacccgattgaaaggcgaagaaaagtgagacgaaaaaataggaaatagcgatataggtatacatattattgaattttttcaggttcaaaaggatcacctctttaaagaaagtatatgcttttgaggaaaccgcgtcaaaatggaggttttgaaaaaatcgtattcagaaattttgtaatatagaagttaagaaatctttatagctcagcttgggaatagaattgtaggacttctattaagaaacccaaaatgaaaaaagaagagaaatggtcgttgaatgaaagattagccgaaaaatttcactttttacaagttacagtgattttagtcgtgagaggatcaaagaatccactccatcaaaaattcttcttcagttgtttcataatctgttgtttcctttagaatcgtgaaaccttgttttaagtaaaactgaacagcacgttcatttttttgataaacgcttaataataattttgaatgcttctcttttattcttgccaataattgcccaccaattcctaatgatctgtattcctgcaatacaaagattccagcaatatactcgtcaatcaagccaagaaagccgatgattttctcgttatgatagtaggcataaagatcagcggtagtgagggacgccttaactgtttgataatttttgagccaataattccggtcaataaaagcatgagactccaaattgctccttaaccaaatagatgcaatggtttctaaatctgcgtcagtaattgtttcaatccgtctaatcatcataagctccaaattttttagtttaatatagttaaagttcagtctttatctatcgattgaaaaaatggttcttcagcgtttgagtaatagtctttatttagtttatcctcagattttactcctaataaagaaacgagcatcggactgaatcctaaaacaccgagtaaaattgctaagggaatataaacccgtttcttttctaagatggatcgtttgctcgacatgggaaagactccttttccataattgtagacgaaagatagtttgaaggcaaaattctttgataacaaaaaacgctctctacccaaaacgatggatagaggcgttcattactttaaggtttaaccgatctttgttgttccactgccgatatgtgcgacatagaaatctggcgcgtaaccaacaatttccatgtatttgtcgtagactttgtttttgaaggttggaatattttcttctttgacaacagcaatcgcacatccaccaaagccggcacctgtcattcgagtacctaagacaccgctttgagcttgagccgcatcgactaaggtgtccagctcaattcctgttacttcatagtcatggcgaagtgaatagtgagaggcattcaacaattttccaaaggcttccaaattgcctttttctaattctgcctttgcttctaaagttcgttgattttcggttacagcatggcgtgcgcgacgaatcaaggtgtcgtcgccaatcaaatcaatatttgcttcaaaagtggcttcatctagatcgcctaatgcttgaatgtccagtttcttttgcagacgagcaagtgcttcctcacattcgctgcgacgttcattgtatttggaatctgccaattcacggcgtttgttggtgttcatgatcaccactgcgtaaccgtcaagctttactggaaccatttcatattttaacgtgttggtatccagcagaatcgcttgatcgatatcgccaaagccaatggcaaattgatccataatccctgaattgacaccgataaattcattttcgactttttttcctgtttttactagctcaagacgatcggtcttcaaatcaaataaatcttctaaaacaactccaactaataattctaaggaagcactgctggacagcccagcaccatttggaatcgtcccttctactaatagctcgaagccatgatcaattttatgaccggcatccttcagttttaagaccatgccttttgcatagttggcccagttgtcttttttatcgtagtccaattgatcgacgtcaaaggtgatgacaccaatatcttcaaagttagtggaataaaccaaaactttcttatcttcgcgaggagccgctataccataggttccataagtgatggaagcagggaagacgtgaccaccattataatcggtatgttcaccgatcagattaatccgtccgggtgaaaagtattgggtcgtttctttgggaccaaaaatttcagcaaattttgtgtttaattcgcgtttaatttccatgtgtattcgcttctttcaagtttattttatattcagtaatcgtttcaaatggtgtgttcgcaggcagtttaatggagccgaattcaggaaattgttctgctcctggtgcgacctgtgtttcaaaagtgatgccgccgtgatgagcgagttgttttccttgcatcatcggtccatcttcaccaaagttggcggtaaagatgacaacactagaagaatctgttgagacagttagttcaactgttccatcagggctagtcagttttgctgcgggtttgttcaaatcgctttcctttaagaagaaaggatgatccaagccgttacatagatttttttgttcaaagtcactagtaaacatatcagccaaagctgtttctgtttggaaatcaaaaggtgttccagttacattcatgatttcgcccgtaggaatggtatctggtcgcagaacagcaacagagtcactatttagccagagcttgtgttcatcgattgcttgagtaggatcgcctgtcaggttgaaatatacatgattggtagggttgaacaaggtagtctgatcgctggtagctttagtggtcacacgccaaacattttcctgtgtcagggtgtgtcgaacctccaccttcaagtttcctggaaaaccatgctcgccatcagggctagtcagtgtgaaaataatggatgcttcctgatcaccattttcgattgcataatcccattttttcgtttcaaagcctggtttgccgccgtgaagagaatgaccagtttctggatcaatcgctacttgatagtctttaccatcaagtgtgaagcgtccattttcgattcgaccagcggttcgaccgattgaagccccgataaaagcatccctttctagatattcttcggctgaatcaaagtttagtaccagttctttgtcgtgccctagactgacgattcgtgctcctaaatcagttaccgataagtggaaaccggattcattttcaatgctaattaagtgataaccttgaccaaaatctttttctgtaatttgcatataaaaaaacctcgctttttttgtgtaatggaaaatttctcgtgtcttaataagtttagcgatttcttgattaagtgacaagttctaagaaaagcatcatcattccctgaaatcaatttatcaagaaatcgttttcttttaaacgtctttctgtgacgactatttaactttttgttgcattttttctcaaaaacagaagaagatcttctacaaatgagcgggtcttctaaaataatggctaagataaaaaagaagtaagccagaaaaaccaattacaaaggaaaagttgccaatataatcataaacaagtaaatcataccttcccaatggtgttactagaacaatacaaatcaaagaacacactgctgctgcaatggtttggattaaaaagttcttatcgccagaataggtgagaatccaagcgtaacaatttgtaagtattagccataagacgagtaaaattaatgcatgggaacttctttcgatcaggcgaccagataaaatagtcataaataaaatgacaaaaaccgcaagagcgatcaatggcacaattactgtgagttttgtaagaaacatgccgattttctttgttctcgctgagctggttaaagtgctggattttcttgccaaatagaaataataaaaacctaataaaataaaaatacctgaaatcaattgttaaaccttccttattcataagatagaaatatccttagtatacaatactcaattcatactgcaacatgcaatcaaagctcaccatgtgcttcgataaattttcagcgttcaagtgagtaaaaagggtatcgtgacaatcaagaataacaaaaaagtaatcattcttttgtgcttttcccttagcagcaaaccggaagtagctggatgtgattcaatagttgtgaatactatcaaaaaatacactattttcatgtatactttagagtgaagattaggatggaggtactggtgatggaacaggcaatttttttaaaaaaggaacagcgtcagttgaaaaccgatctgcattttgattattgcggaatttcaaaaacgctgccctttcacgcttttggacctgcgattcggcaaaattatacactgcatatcgtaatggagggtaagggaacctatcaagtgaaaaatcaacagtatcatttaaaaaaaggtgatttgtttttgattcgtcctggtgactcaaccttctatttggcggatggggaagatccgtggatgtatggttggctttcttttggcggagccgcagcagacgaaatcattcaccattcacagtttaaaaaggatcaatacacgatggtatcttcagatacgcaaaaatatatcaatactatcctagcttgtttaccatttgtggaggaaacactcacgaatgagctgcatttaaatgaattgacctatcgttttttagcaattctcttagaagatggtggcaagagtcatttaggtaataaaaaggtctattcacctttggcggtagcgactgtcgaatacattgaagctcattacgcagagcatgtgactgttgaggaaatcgcccggcggttagcggttaatcgcagtcatctatcacgagtctttcgtaatcacatggatattagtatcagagattatttactgggggtacgaatcaatcgagctgcttttttactttctatgacagatgagtccgtcgagaatattgctgagcaggttggtttcaatagtcttgtggtttttagccgaatgtttaaaaaattgactggagaaacagcaacagcttatcgcaaacgaatgaaaaatgaagattttaaaaatgtatcgttagatgatttaaaaaatcaattaaaaaaacaagcggtggtaaatagagcaacatagctaagtgagcgtttacaaagccttgaggttatcctatacttattttataagtatagtttttttacataaaatgcctaagctgtctttttggggaagatacctattttttaattatccaaaagtatggcagatatggtgaaaataaacgggagggatccaaccatgaaaaaagcgagtgaaatgaccgttgaggaactgggtgcgtatattgatcagtccgtattgaagccggattttacggaagcagagattcgacaatacattcaagagggcattgattatcattgcgcaacggtttgtgtaaacccatcttctttggatatcgcagcggagatgacagaaggaaccgataccaagatttgtgtcgtttgtgattttccatttgggacgagtacgactgcctccaaagtgttgcaggcagagacgtattgtcagcgaggggatatttatgagttagatattgtcgcgaattttggttggattcgtagtggaaaatatgatgaagtaaccaaagagctgaagattatcgtggagacgtgtcatgctcatgggacagcagtgaaggttatttttgaaacggatacattaaatgaagaacaaattcgtcaagcctgcgaatgtgcgattgcggcgaatgctgattttgttaaaacaagtactggctttatcacgggttatgagagtaaaggagcaactaatgaagtgatccagatcatgatggaccagtgcaaaggtcgaatcaagatcaaaggaagcggtggtattcgtacgcgggagcatttcttagaactaattgatatggggattgaccgaatgggtatcggcttcaaatccacaccagtcgttttaggaatggataattaatatggagaataatctactttttgaaaaacgagaagactttcgaacgtggctcacggaaaatgcgacaaccagcggcggtgtatggctggtttttggtaagacaaagcaagtcaaaagtctaaaagctggggaagcattggaagaagcgctatgttttggctggatagatggggtgatgaaaaaggttgatgaacactcttatctgaaatattttgctacacgacgtaaaaatagtaaatggtctgaaaaaaataaaaaagtcgtggataaactggagcagcaaggcttaatgacagatttaggtcgagaaaaaatcgcagaagcaaagcaaaatggccagtgggcgaatgcgacgaagccatcagcgattacagatgaacaaattgcggaagtagcagcgttgttgaagaaaaatgccgaggcttcaaagaattttgaaaatatgccgccttcggttaagaaaacctatacccgagcctacttagatgctaaaactgaggctggaagaaccaaacgactagcctggatgattgatcgattagagaaaaacttaagaccaatgtaacgaaacgctggaatcttagtctgattccggcgtttctttgcgctgaatataagttgacaattctttttggtaaacttgccagttcgcttcacctgtattcaaatagtgagccaataaatagccaatatacggaccagttgtcaacccagaggagccaagcccgctagcaaccaataaatgatcatccaattgaccaaaaaagggggcataatcagacgtatatgcgcgtgtcccaactcgataatgaaagggtgtagttaataatttctcaggttctatgaggaaatcccgagcactattcgtgagttgttcaaaagcttctggtgtttctgacaaatcccaagccgcttcattttcatgtgttgcgcccagtaaaatttttccatttaagaaggggatcaaatcagcttcgccatctaacatggctaccgggaaatttccgctagagttaaaagccgtttcaaatactaagagctgccccttttgtggacgtaaatcgacttggtagtttaaaggagctaataatccttttaaatgagggccgacagttaaaataatttgatcaaaagctgcttggttattgccataggtgagggactgtatatttgctaactgaacacgttgagaaataaacttaacgccgctgtcttgcgctaatttacgcattcgaatcaaataggcctttccatctaagcgaccgccaccgctaattttaagagctggcaagggctttagtaagggtaattcttgctgtgtctgttcgccagtcagctgcttgatcgtaccgatttctggtgcgctttttttacgttcttctgccaatgctcgtagctctgctatttgcttttcgggacgtaaaagcaatgttccagattgctgatagattgtatgatctagctggaaatcttggatcaattttggaaagaaagccgcaccatctttggctaatcgataccactgcttatttcggcgtttggacagccaaggagagataatccctgcactggcttttgttgcttgtccagtaggatcatcaaaaagcgttacttgatatttttttggatctaaataatttgccagtgtcatcccaatgatgccgccgccaatgattgcgattttttgcataagtttcaattcctttttttcttaaaatttatatagtcagtaagatcatatcactagattgaaaaaaatgctttttagatcattgctggaagaatagtgatagtttaacgctttcattgattaattttactgttttgaaaatatttttcgaaaattcaaaaatattttactttacctgtcgtagtaattagcgtacaatgattacaacgacagatgaagtaatttcaggaggtggcaaaatgatttctagcgatgggattcgcggatacaatgatgtcatcattttgtccgtacttaaggatggcgattcctacgggtatgctgtttcccagaaaattagagatgtaagcgaagaaatctatgtcatcaaggagacgacactgtattcggcgttcaatcgtttggagaaaaatggctatatccattcttatcctggagaaattacccatggtaaaaaacgaacgtattatcagattacagataaaggaatggcttttttggaagaaaagcgggatgaatggaagcaaaccaaaaaagttgtgaaccgatttatgaaagaagggtaaaaaatggatacgatcaaaaattatgtagagacattatttcttgaatttccaaaaacaaaagaagtcttgcgagcaaaacaagagattttaacaataatggaagatcactatttagcgttaatagatgaaggaaagagcgagcacgaagcgattggtcaggtaatcagtgagtttggctccgttgatgaattacgtgaagaattagaatttgcttctcgtgaaaaagaaccggaaaatggaatcaacgaagacgagatgtatcagtatttgaccgaacgtaagaaagatgcaatgggtttaagcttagggatcagtggttgcctgcttgcggttggagcattgattggattgggcatccgtggttctgagatgatgggatttttattgttttttgttatgatcgctatcagtgttgggattattatttataatgggatgcagttttcaaaaaataattcagaattaaatgatcgttatatcccgattgacacgaataaagaggctcaaaagttgaaaaaggggtatcaaaaaagctttcaagtcagcttagtatttgggatttgtctgtgtgtattaagtatctcgccgattttctttttccaaatgtttacctacgcggaatacggaattcccgtgatgttcttctttttggcaattggggtgtttctaattatttacggcagtatcaattacaatagctttgataaatttattaaggaaaaatactttatcgctgatgaagatgaattaggccccaatgcgatgcaggcaaaatatggtgactcagcacgtacgaagcatttgcttgagagagtctattggccaattgttgtgatgatctacttaggttggtcgtttttgagcggggcatggggtatgagctggatgatctttgtaatggcaggaattttttacagtgttttggaggccatttttgtaaaaaagtagtataagatttatacgttgaaagacgttttaggcataattaagatgcttagaacgtcttttttatctgttttatcagtcaaaatcctttggaaaatttcttattaaatcctcatcggttaatgattgacaaaaatccagaataaacttaaacttaaaacgaacatatgtttgctttttgaggaggtggttttgatgaatgtgtacgaaggggagcctgtcagagatgttttctgtatggactcgaaaagcttttatgccagtgtggagtgtattgagcatgacttagatccgttgaatgatctgctagttgtaatgagtggggatcgcgagaatgaggggttggttttagcagcaagcccgatggcgaaaaaagttttaggcatcagtaatgttagtcggggatttgaaattcctaatcatcccaaacttcacattgtaccgccgcggatgacactctatattcaatatcacatgcgtatccaagagatttttcgttcgtatatggcagaagaagacattcatacctacagcattgatgaacaatttggggatttgacccatagctggaaattatttggcaaaagttcggcggaagtcggaaagatgattcaaaatgaaattattaaaaaagttggtatttatacttcgttaggaatgggagacaatcctttattagcaaaaatcgcgatggataatgaggcaaagcttactaaagagcggtttgctcaatggcattatcaagatgtgcctgagaaaatttggccgcttcgcttaagcgaattctgcggaatcggcaatcggatggagcgtcgctaccaaatgatgggtatgtataccatgggtgatttggctcataccgacccctttgtcttgaaaaatcattttggtgtgatggggatgcagcattatatgcatgcttgggggattgatcgttctgttctctcgcaaaaggatttgtatcctactaaggaaaaatcgattggcaactcacaggttttaccaaaaaattatgctcataaaggtgatattctaactgttatcgctgaaatctgcgaacaggttgcacaacgattacgaaagaacgatgtattaggcggtacactgcatctaggaattgcctatgcgtattttggcagcggaaaacgcggagggtttcatcatcaatcgaaaattccaccgacctatcaagcgcgcgaactaacaaaagtagcttttgcgttgtttgaaaaatactgggatcattctgaagtccgtaatatttctatcacagtttcctctttgcgaccagcagggaatctacagttaaatttgttcgaagacccgcagcaaacgatcaaagaagaaaaaattgatgaagttattgctcaaatacgcagtcgttataaattcagctcgattgtgcgggcacattcgttaaatgaaggagctacagcaatcaaacgagccggtttggttggcggtcatgccggtggaatggaaggaatggattagggatgatttatgatgatgaaagtgccgaaagattatttatggaggcaaagcaggtttatcaggatcgtggaatgataaaatggatcggtttttatctttctgatcataccgccgtactgaataaagagtcgaaagaacggaaccacatcaatagtgaaaaagaaccaatgtctttagaagaaatcggggcagttttgcagcaggcatatttgcaaaataaacgaatcgctatccagctggaggctctagatgatgaaggaaactatttagatgatttggtaggcaggcttattggacaaagagaagaacaaatttatttaaaagaagaggaacgaggcgcaattcatttgacgattgagcaaattcatcatgttgagattttaggtccgaaaaaaattcttaatcagaagattacaaagtaagaagtaaagccatgacgagaaatcgtcatggctttttcggaaaatagttagaataatttgatttcgtttaacggccagaaacgtacaaccacttttccttggatcaaggatttgtcaacgaagccgaaaattcggctgtctttagaaatcaagcgattgtctcctaaaacgaaatactgattctttggaacagttacttcaaaatcgttggtaaaactgtcagcattagctgcttgttcctgaaacgcagtattataggaatattcctcattaagcttgtcctttttgaactttttcttaaattcatcaagatatggttcggcgtattctttgccgttgattgtaagtacattgtttttcatctgcacatgatctccaggtaagccgatgattcgctttactacatacatattttgattgtctggttccttcgtagtgatgatatcctgtcgatctagattagatatttttgatgtgactagacgctgcttgtcgtgaagcgttgggtccatcgaatgtccttcaacctttaccggagagaaaacaaacatcctggctaaaaatatcaatgctatgataatgactacaggaagccattccttgattattttattcaatagattcacctcattgctaaattttatcattcttcaaaacaaaaagctcttatttgcttctaatataagaaaaaggcgattgagggtagagatttttgtatgaatatgggaaactgtaatcatgctgaatgaggaaagaggtagctgtaaattttaagcattagaagaatgatctatggtgtaattccattactttaaaatgaacaaggatgtcagttctgctttttgcagtgtctaagaatgcaagagaaaaatgcgcttctgaggatgatcacaaatgagcagtttagcagaatgatatacggcgagaaactgaaattaatttttgataaaaaattaatactttaaaatgaacaaggagcaagacaatgaaaaagaattatcctgcaccaccgattttaccgaaaaatttctctgaggatttttacttggaagatgaagcaaccattgaggatgtccatggcacggattttgattatagttatttaacctgtgaaaatttagtgttacgtcgttcgattttagagaaaatcacgatgcagcggactaaattatatcgatttgaagcgagtaatgtaatttttaagaattgtgatttctcaaatctggaatggatcggtggcagctttcatcaggttatttttgaaagctgtaaattgactggttgtaatttcgcagagagttatttaagggattgtcagttcaaggattgtgtgattaacttcggctcatatagtgcgacgaatttaaaaaatgtcacctttgaaaattgtcaaatgacggacagcgaattctttgaagtgacttggaagcatttattcttgttcaataatgaattggataatagcaactggatgcggacaaaactatctggattggatcttactacgaatcaatttagcaagatagctttttcgatggagcatctgaaaggattgaaagtgaattcttatcaagctatgaccattgcggctggattaggtttacaaattgaggaggcttagatgaaaagagaaaaaaagaatatccaaaagattccggttatttgttggggagaaccaagcgatgagataatcttagcatttcacggcgatcaatctcataaggaagataccgtcattcaattgttggctgaaactgccacacaaaatggatatcaagtttggagctttgatctgccagaacacggcgaccgaaagggagttgactatgcgttaaacccgcaaaatgttgcagccgatgtgaataaaattttgcatgaactggaagagcaaacaaaaacattttcgttatttggctgcagtataggggcctattttggtatgttagcgtgtcaaaataaaccgatcgaacacagtctcttcctatcaccaatcgttgatatgcaggaattgatcgaaaatatgctgctttggtcgggattaaccaaagccgatctgcaacgggaaaagattatcgaaacgccgatcaagacactggaatgggactactataagtatgttgttgagcatccgattaattggacagctccaacaaaaattctttatggcagcaaagataatctgacctcaagagcaacgattgaaaagttctctgaaacacccaatagttcattaactgtttttaacgaaggagagcatttcttccatacgacaaagcagttgcaggtttatcaggaatggttgaaaaagagtatttaaaagaagtatcctagttaattttagctaggatactttttttcgatgtgcgccctgcatgggtgaaaacttggtggtgaaagtccactacaggcttggcagtaggaactgttagcgaaagacaaggcggcaatcgtgaggctgtggctgaaggaagtcggacgcaaactcctgaactgacgaacagaaactagatacaaggctgaattaggtcggataagtcttcatcacaagacaaagtccaatactgcccgaaacctatacagtaaatctagcagttacatgggaggaaagttttcactcttaccgggggagatctcatgagggtgttgtgggcgttgaatgaaaacaaaccagcacaacgatcatggcgacatgatggtgaatcatgagaagtcagccgaggtcatagtagtaacgacactgaccgttacgaaggactgaacaataagaatcttgaataatttaggaggtgtgagaagatgcgacgaccgcagaaaacaagaaaacttggctatcatcaaagagctagtgtggaacacgaagggtatgatgaagtgcgcagcacttcttgcggtgaacagaggaaacaagatggtgtagaaaatctgtttgggagaattctagagcggaataatctcaatcaagcgtaccttcaagtagtcagaaataaaggggcggctggtgcagatgggatgaccgtcgatcaactgcttccttacttgaaagagcaccgcgaggaattactatccaatttacgccaagggaactataaacctcagcctgttttgcgagtagaaataccgaaaccaaacggcggtgtaagaaaactaggaattcccacggttattgatcgtatgcttcaacaggcaatcaatcaagtgttacaaccgctatttgaaccagaattctcagataatagttatgggtttcgcccaaatcgcagcgcacatgacgcagtgaagaaagcaaaatcttattatgaacaaggttaccgatatgtggtggacattgatatgaaagcctactttgacaccgtaaatcacgataagctgatgtatttcgttgagcggaaagtaaaggacaaacaagtcctaaaactgatccgtcaatacttaatgagtggtgtaatggaaaatggactcatcacaacaacggaagaaggaacgcctcaaggaggcaatctctctcccttgttaagtaacatctacctgaacgaatttgatcaagtgctagaaaatctaggacataaatttgttcgatacgccgatgactgtgcgccatgaaagtgtgcgtgaatagataaactattcaaagcagctatgctgtatagatgatggcagacggcctgccgaaaccgccatacaggtggaggtttcaaaccaccttaaggtgctgtagtcaaaagctatggtattgagcgttaaggaaaaggcaaccaagagttgtcaggtgtgtgttatggagatgagtgaccatacgaaccacccacagaagtgtcgaaagcgtataaattccgtcaaaactgggtatagtcgttgacctaggatgagcttggaggaaacctgtttactgatcaggcggcgggcggcataaaggtggcatgaacataacataggcgtctatatggaacgtgggaacccacgggctgatgtcaagggagtatttcaagcggaagccccgcaagaaaagagtaccgatgcagtcatgggggcagattgggttgtagtagtgaagaagctcttgtaacgagagtggagcgaagaacctgagttatccagtttcaaggataagtcaactttaaggaggaggaacttatgcaagaaacaaagtcatacaatatttcaaaacaagcagtttaccaagcatttctaaaagtaaaagccaataaaggaacttttggagtagatgaagaatcaattgaggcttatgaatataagctgaaagataatctatacaaactgtggaatcgattatcatcgggaagttatttcccaaaaccggtaaaggcagtatccattcctaaaaagagtggtgggctgagagtacttgggattccaacagttgaagataggattgcacagatggtagcgaagatgtattttgaacctgtagtagaacgattgttttatgaggattcttatggctatcggccgaataagtcggcaatccaggcaatagagaaaacaagagttagatgctggaaaagagattgggtactggaatttgatattaaaggactatttgacaatatcagacatgactatctaattgaaatggtaaaaaggtacactcaagagaagtggattatcctatatgtggaaagatggttaaaagcacctttccagagggaagatggttcgactgtttcgagaaaagccgggacaccgcaaggtggtgtaatcagtccagttctagcgaacttgtttcttcattatacgtttgatgacttcatggaaaaagaatttcctaatatacagtgggctagatatgccgatgatggtattactcattgtgtatccctaaagcaagcgaaatatctgaagaaaagattggaagaacggtttagaatctttggtttggagttacatcctgataagacaaagattgtttactgcagagatagtgataggatggggaactatccgataacgacattcgatttcctgggctttacgtttagacctagaggcgccaagaataaatatggaaaatgcttcacaaattttcttccggctgtatcagataaagcgaaaaaggcgattcgcaaagaggtaaggaattggcgattacaattaaaagcggacaaaaagctagaggatttagcgaatatgttcaatagtaaaattcaaggatggatgaactattacatgaaattctataaatcagaaatgtacagtctactgcgctacatcaaccaatgtctcgtgaagtgggttcgtcgtaaatataaaaagcgacaagcacgaagaaaagcggaacattggttaggggaaatcgccaagcgagaaagaaatttattcgcgcattggaaaattggaatattaccatcggctggataatgggagccggatgagctgagaggttcacgtccggttctgagagggcctaagggggaggttcccttgggctacttactgcaatatctatgttagaagcaaacgagcaggacagcgtgtgatgaagaaatccattcaatttctcgaagaacaactaaagttgacggtaaatcgagaaaagagtgcggtaggaagcccattgaaacgaaagtttcttggattctgcattctgccaacaaagaaaggtattaaaattcgccctcacacaaaagcaaaacagcgtgtgaaaagcaagctcaaacaactcactaaaagaaaccgtggaagaagtatccaacttattttaaaagaaatcaagcaactaatgactggttggatcaactactatggaattggtgagatgaaagaattcatgagggagttaaacggttggttgaagcgaagaatcagacaatatatttggaaacaatggaagaatccaagaaccaaaaggaaaaatctgattcgtttagggatcgataaagcgaaagcgtatgaatggtcaaatacaagaaaaggtatttggtcaatctccaaaagtcatattcttcatcgatcattaacagacaaagaactggcccgccaaggatatgaggacatctccttgaagtaccagttcgtacactcaacttattgaaccgccgtatacgggtccgtacgtacggtggtgtgagagactaactatatagagtcaagtaaaaattagccaaatcaaaaaatattttataacagataattccgaaaaaagggtacaacaaataagcttcttaccattagtttttttgaatgttcaatagctaatcagaaacaattatataaggctcgtttttagtcaaaatagcatgaatcacgtaacaaagcttacgagaaaccgcacctaaggcagttagatgatgttttccttcggaaacttttttctggtaaaacgcactaaaaacaggatcacattgagaagctactaaagccgccgaaaacaaggcttttcgcaaatatggagaccctcgtttactcataacattatgcgttgcctcatattgccctgattgtgtcacggaagcgtctatcccagcgtaagcaacgagttttttcgggttagaaaatttttgaatatctccgatctcaccaagaatagtcgcaccgtttataggaccaattccaggaattgtgagaataacagaatttaaagtgtccattatgtgcttgatttctctttccgtttcctttatttggctttcaatgaattttaattgttcaatcattgaacgtagttggaaggtgaacgcttcttgagcaaattttactccaaaggagttagaagctgcttgcttcaattggtccgctttttctgccttgattcggttcctgcttaactcagctaagtattgggccaaagtttctgaggaaatgttttctaagtcgatcggggcactaaacgccagcaataactctttagaagcttttccgaaaacgccctgcttggtaaaaatcgtcgcgtattctggaaagacttgatccaatacggctataatttttcttttgaagtcgctcgctgtacctactaaataagttcggtaacgagaaagttgtttcaaagaaaaaacattttcatcggataagaccgtttcgacaaatgagccatagcgcattaagtcagcaatcaaaacagaatcaataatatcgttttttcgtttccgtatttctgtacctttacgccatccgtctgtttgaaggggattcacaacgtgaatcaaataatctgattcgtgaaggtatgaaaagatggacagccaatagtgccccgtggcttccatccctataacaaagtcactgggtgctccggaatagtcgaccattcgctcaattaatgactctgctccttcagtggtgttaggaaatgaaaaaccttttagtaatacctttccttcctcgttcatgatagaagcaacgtgagtgcgtttaccgatatcaatgcctaaaaagtacatgtatatctgacctttcaaaaaaagaattttggattgaaatccactcaactgaaaagcgtcactaccttgtacgagatacggagtaaagtaaggactttcaacatctaactcatacgcaatccacttatcagagagaggagccagtctctcgagtgcgggttcaatgacccaaggggggaacggcttagcctctcaatccaataaatatattatctcaaaagaaatgagttaataccaaattaaaataacgatggttcatagggttatccaatcaaaaccggaaggttaaaaccctaactctaatatacaaggtggaaaatacaagtgacgaaaatcgggataattgaaaaaatcggttttgctttaacgaatttaggaaacataccaatcatgacgttgttgaatacctatctcttaatcttttatacggatgtcgtgggaattgatcccgccattgtcggtaccttgttcttgatttcaagattgttggatggggtaagtgatcccttgcttggttttctgattgatcgctttccccggacgaaaatcggaaagtacaaaccaattctaatcgcaggttcacttatctgttgtctcaattacttattagtatggttttctccattgctttttgaaggacagaaaattttagcgatcagtttttcctatattctgctaggcatcaccttcgatttgatggatattccgttaaacagcttgattcccgtattgacaactcaagaatctgagcgcaatatattgtcttcgattaaagggatttcctacaccgtagggccaacattgttaaatatcgccgctcctttaattctggcaaataatagcagtaaaatttccggctatctgatcttaatcgttggaactgtcatcgtagtggccttctttaccattgtgggaaccttaacgcttaaggaacgagtgattgaacacatggagccttcaaaatcgaaaaagaaacactactcaatcaaagatgcactaaagattttgaagattaaagaagttgcgactctctttatcagtatgctctttattaccgccgctacaaatatttttaacggctctctgttgtattatttaagctatattataaaggaaccgcgcttattaagtttagcgagtttcattggtttgttcggggctttaggtgctgggattcttgtaccaagcatttctaaaagaattggaaaaatcaacttatatactgccgctctggtaataattagcatttctatgctctttctaatggcgtttaagaatttaaagcttgcctttttgataggctatgtcttggtgcaattcggattaggctttacgaacactttgcagtacagcatctctgctgataatgttgatatcgttcgcaaaaaactgggctttgaaccagcaggattaatcgcgtcactgaactcacttatcatgaaatttgcgatggctttaggtggtgctgtccctggatttgtcttatcttatacaggttatgttgcaaataaggaacagctgaacagcgcgtctgttggaatcattgtttcaacctttgccattccttttgttttgtatattttgaccattctagtctttaactacggctttgttttctctaagaaaaagtcacttttgaaagaaaaaagcaactctccgatggcataattagattgaaaaggcatgaacataaaacaaccaacattcgtttgatatggctagaacgaatgttggttgttataagtaaatttttttgtacttttgaggaatcatcactaatcattggcataccaaagaatatttgataaagtccattaaatttagaattgactttatttcgctttgaactttattattttgcggaataaaattcaaatatatggctgacagctgtctattttgttaaaaaataaagtacaaaatcggtataaaaaaattaacttgtttgacaaaaatacatctttcttttcaaggtgaactaaaagaaagagatatattctttgacaaatcttaccgagcattttctttttaggtttctaatttataattgatagtaatagttattcgaacattggtataatcaagaggagaatattttccttagaaagaggttttgaaatgtccaagcaaacatatttacccgaatttaggaaaattcgagaagctcttgaaaataataatttggttatatttgtgggtgctggtgtatccgctaactcgggattaccatcatggtctgaattagttaaagtatttgctgaagaaatcaattatggtccatattgtcgatcttctgaaaaaggcaattataagttctcttcagacgaactgctcaaaattccgcaatatgtttacgatacggacaccaaaaagtattttgagatcattgggcatgagcttaagaacgagaactttttctcaaatccactgcataaactaattgtcaatatgctacccaatcacattataacgactaattatgacaaactgttagaatcctcaggtgatatgaacgattctcaatatagagtagtttcttctgatggaatgctattatcaaaccaaggggaacattacatcataaaaatgcacggagatatagacgacttagaaaacattgttttgagagaagatgactacttaaactattcaaataagcacatactgattgaaacgttcattaaatctctattagtaaatcacgtttttctattcgtgggttattctctaaatgattacaacttgaaacagattatgagctggattgattacttatcttcaaaagaatctgttcaaaatttaagacataaaaattatattattcaaaatcagaaaccagaagaatttgagctaaaatactggcgacacaaaaatctttcaataattgacagctcatttttagatgaatcattgattgagaggtttgagcacgctgacttagagcatgatgtaggaaaacgattatatacttgtttacagattataaaagatgatgatctagatatgagccttacggattatgcagctttcttaaaaggcagatattctgtttttgattcaatgagttggattaatattgatgacttgaaagtagttagtgggattaaggatgataattatgaaagtggtagtattggtttttatgatgaaagaatgttcagaaattgggtgagtctgagtaatgacccaacgatttgtgattattggaacagagcaggaatttattctgtgtattattttaaggataggatttctgaaccgatcgaaatttacagggtgaatgataatgaatctattctttatgatttagcctgtacttttcaatatgaagagcttgaaaaacaattagttaattctgacgaaagtgaattagttaaaaattactatcgctcgattattaatatttcagatggagaactaaaaaaatattatcaaatggaaaaaaatgagattaatcaactaacgagatgggaaactctactttacaaatttaacgagattcttttcaaaaaaagggtgatgagagaaggatattcaaagcatgaagtaattagatactatgaaatgttatcaaaaaaggaaaagctggcctatgattacttatataaaatagttcaaagtggttatgacattcagaaattcaagaaaatggaagatttattacttaaaacagaaaattattatgaaaacccatacgcacatactaataaagagtttggggatttgcctgaaatccaaacaattgcttatcaccactttctgttcattcggaaaaatggagttctaatagactcataccttgaaacaaaagttttttttactgtctatttgaaagctttgttaatatcacaaaagcaaatcgaaaagaaaaaagatattttatttggatttggaaccccattaaaaaaatatgagtggtgtgctgatgatgttaatatttttatttcttattccgattattcagaaataaaaaaatatattatagatcataaaatcccaaatattacctttgatgaagaaacaagtgttacgaatatttttaagaatttttgtgaatctactattttttgtttggaaaaagggagtaaaaagttatttgagcaacttcctatttttttctttcttttaatgcattgtgaagtagatgaaaacgataaaaaacaaattcttacatcgatttttgaaatgttggcccatccaacatttaatgattttcgtggggttgatcctaaaatatcaattagtttaattaaggtaatcaactattttatatctcaaggatcgaaaatatctgttgactattttgttcttttattagagagattaggaaaagaggctcgagaaggacatgattttcttaagctgatatctaagctgaaagaaaacgaatctttttatagaaatgaaaaaatacagaccactattagacaacttgagttagaaatgatccatactcgggagagagttaattttttaggcttaatgtacccaatgatgtctgagaagcagaaacgagaatattctgttctgattaataagaatgtgattattctggattctggagttcttttgaatctaatacgccttgatgttatacacatcgatgagtctgttaaaagagaatttgtacagttaattgatcaaacaattgaaaaaaggaagtcaggatacagtagttttcctgatccagaaaaggaaacaattgagaaatccatagttttctatttgttaggtacagtggataatattgaatttttaaagccttttaccacaagttctgtttttcttgatttcattttcaattatgagtcatttgattattcaaaaattgattttaaggaatatatgtgggtaaacctatttaagaatgatttctacagagagaaaattttaattcacggaaaagaaaaaatcaaaaaaaatttgatcaaagacattaacaatggtgatgcaaaagaagagcagaagaaaatattcttcaaatatatagcctcagaagaagaattttggaactactcataagtagtagtgttagtaagtaacctttgctaccttttcattgggaaagaaaagataaagtttttaaatctgattaataactagtaaaaaaagtagtaacattttctaaaataactgctcgttacacaaatacaagactaaacgtttaatatttgagtaacgattttttgtggacacatttactaagacagaacatatgaatagattaaaccatgatatactttatgcaagaatttatttgagaggggttcccactttgacgtcaattaaatctttattagagaataagcaaaaaactgaatcggctacactagactagacagaaaaaataaggtgtgtagaataataaaaaacacactggaggatttttcatgtcaagacgtcaacgaagaacctattcaaaagaattcaaacaacaaatcgtcgatctctatctcgctggtaagcctcgcgcagaaattattcgagagtatgagcttacgccttcttctttcgataaatggatgaagcaagcacaatcaacgggctcattcaaagaaagagacaacttaacaccagaacaagcagaattgatcgcactaagaaagaaaaataagcaactcgaaatggagaatgatattttaaagcaagcggcgctgatattcggacgaaaagacaagtaattgatgccaacaagcataaatattccatatcagcgatgtgcaaaattctaaatatttctcgtcaaacctactattatcaagcgaaaccgatcgaaaatgagtccgacttagaagagatcgttcaggaagagtttattcgaaaccgaaaggcttacggtacccgaaaattgaagaagtgtttagcaaagcgtgggcttcaactcagtcggcgccgaatcggtcgaatcatgaaacgccgcggattgacatctacctatacgatcgctcattttaaagggcaacgaacagcttgtaatgaagcgaaaacagcgaatgtattagatcggacctttacacaagaacagccattggaagccatcgttacggatcttacttatgttcgcgtggggaaaaagtggcattatatctgcttaatacttgatttgtttaatcgagaaattattggttattcctgtggtgagaagaaagatgcctcattggtaaaagaagcctttggacggataccgtattctttaacagacgtcaagctttttcatacagaccggggaaaggaatttgataaccaaaccattcatgagattctgaatggttttggaattactcgttcattgagtaggaagggttgtccgtatgataatgccgttgcggaatcaacctataaatctgtcaaagtagaattcgtgcatcaataccaatttgagacactggcacagctacgtctagaattgtttgattatgtgcattggtggaactatctacgcttacatggcacgttggcgtatgaaacaccgatccaaattcgacaacagagattggcgaagcgaatccttgataatgagcgcggatctgatacctctggagaggcagcgtaattgaatgattgtgcttctgccggagaaaatcagatccgaggatgctcattgtcaagggaaatcggagccataacaccgcagcattcacaacaccttataatttttgtcaaaaaaagtgttgccattccaaacattaattacaaaactagaagctgatattaatcatcccacttctaaaggtgataattgtgaaaatgcttggatcaatttttttaaaagctttttacccagtaaatatgctgtagataaagggtttatatttgattctaaaggaaacttgagtgaacaaatagatgtaataatatatgattcactttatactccattaattttcgagacagaagttggagaaaaatttattacttctgaaagtgtttatgcagtatttgaagttaaacaggaaattaataaagggtatttggaatatgctcaaaaaaaaatacagtcggtaagaaagctatatagaagttctagacctatgattgtagccggaaaaaccgtaccagcaagagctttgacaaaaatactcggtggtattttagcttcaaattctatttcttttgaaaatcttcgccgatatttagctgaatatccagcaattgatttaggttgtgcaattaacaatttttcatttataactattaaggataaaaatgacaatactgttaatgtagtgaattctaattctgatgaagtcattttatctttcttttttattatacttgatgagctttataaacttggcaccagcccagctatcgatataagagagtacgctgacttttcattagatagtatccaattgaaaagagaggattgaatttatgggaaactccagttattttactaatttacttacgaacatcgaactaagcaaaacaacaaagtcatatgtcagtagtttacagtctaatctaagagattatcttaagaaccacattgagtataagactaagcacattgatacatttttatctggttcatatgcgaaaaatacttcgatacgaccaagcttaaatgaagaaaatcaagatgtagatattgtggttctaacaaattatacaagagatacgcctccagttcaggtattgaatgaattgaaaagtgtgttaaaaaacaacagtaaatacaaagaagtcaaactacaatctaaatctattggaattgagatggccaattatcatattgatgttgtgccaatcgttaaagaggctgatcatttttatattggaaaccatgaaaaggatgagtggaatttaactgatcctaagaaacatatttcttggtctacagaaattaacatgaaaaacgaaggaaaatacaaacctattgttaaaatttttaagtggtggagaaaacgaaaagtcgttggcgatttaaaactaccaaaaggaattcttttagaaaaaataattgctgataattttggtgaatcaaaatacgatatcgaaaacttattagtaatgacgatggagaacatagtagataattataaaacagtctatatagataaaaaagtagttccatcagtttacgatccagttttaccaaaaaacaatttatttgataagtatacatttgatgatttttctaaatttatagaattacttcaacaagatctattgtttttgagagagaatcattgcactgtcgaggcttgggaaaaaatattaggtaatagcggtggtaaaagtatagaagatgttcgagaagagtattctttctctctaaaaagacaaatggatcagctattaaatcaagttattgaaaagtcaaaacagttaagtgtagaaatcaaggattatgaaaataaaaaaaaggaaattgaaaatagagaaaaaagtatgcaaaaaaaagaggacgaaataaagtatgatgtttatttggacttcttacaagaagcaaaatacaatctctctgacgagttaataaaagggatgggcagagaatattggatggatatgattaagattttggaatcaattaaaaaaaagaaaaatagtagttttagaggatatgaatatagctattttgcttcgttgtataaagcgctagaattaaaagaagaatactataattctatatgtcttatggtcgaagacgggttttatctgtcaaattatgacgtaaaatatattattgataatacttactttagaaaaaggttaattgatatattaagagcaaaaataattaaaggtgattacactgatactgttgagtcatatagaattgcgctaaaactactggaagaaaattatttccaaaagagtgaaaacaattgaacacaaaaaggctgtaaatttcctaagaatctagaaaatttacagcctaatttggtgcattcttttaggtatatcctaggcatcttctaagccatcttacaaaatgtatctcaaacaacttgatataaattcttcattacgactaccgtcagcaatgaaataagaagtagaaattggaagtcatgcaccgtgactttgaaagtaagttttttgatagtcgacctaactatcacgccagataatctggttcccttccaggtaaaggataatccttcagaaattccacttaggtcaaaagaatttctgacttctttcagtattatattagctagagaaattagaaaagtcaatttaataattgaaaatgatagtaatcaaatcgtgtcgtatgataaatgatgatattttttggtagttaagcattttagatttgatgatagggtgaatagagagaagtttgaaatgacgaaaggggggaccgattcaatcaattagtcccctctcattctatggttttgctgattctttttttctacgttcattgtagatttgttttattacataaatcccaataaacaaagcgaacatgctcaacaagccaaacataatcttttggctattaccggttaagttacttcctacataagaataaactatcgtagctggcaattgtcctaatccagtagcgaccaaaaaaggaatcggtttgatcgctgtcaacccagcagcataactgataaaatcaaaagaaatgaagggtaacaaccgacaaataagaatcgtgtgtttcccatatcggtcaaaatattcatctaatttctgtagggaaaaattcttatttattttctctacaacatctctgccagcgattcgagcaatatagaaacatagtaacgctcccgccattgcgctgctccaagaaagaattgctccttgccaccagccgaataccgctgcatttgcaaaagtaatcaaaaatgcaggtaacggagcgataactgattgaaacatcattaatagaaacgaaatcagaattgcccaagcaccaaatgattttatatatccaatgatactttcgacactcattgagcgaaacagcatcaacacttgagtaagtttagatttgaaagcagggatgtacatgaaacaaatgacactaactaatacaatgattattagtataattctggctagttgtttcttattcagcttcttcattatttttcaacatcttctactttagcccaacgatagaaagaaccatcatagtttttaacgtttttgaatccacacatatccatcactaattgagtgtaggctgaacggattcccgcggtacagtaagtcacgattttatcatcttttgacaagcctgcatcttcaaatagtttagtcaatttctcattgctctttagagtaccattcttattgaacatatcagtatatcgaacttggattgctccaggaagatgcccgccttttgcctcaccatataacacttcaccattgtattcttcatccgcacgaacatcgacaactttatactcatcgtaatccgcttttagttcgtctgttttgatcatatgatcttggttcagagaatctatctcaacgtctacaggttttaattcagttccgcctttattcgtttttattccggcatctttaagtgcagagaaaccgccatcaaccatttttacatctttatatccagcagcaagcaattcccacgcaatccgtccatcgtcaccccagccatcttgagcagaggcaaatagaacgacttctttatctttatcaatccctttatcaccaagacgctcagccaactttttaggttctaagactaacccccaattttcgtcaccagaagcaccactttccacatccgctagatattgccaagccattggaacagctttttttaccgtccctttcttggcagcatcatcaccgcgagcgtcgatcagaatgatatcatcaaggttattcttcacgtaatctgcatcaacagtatattctcccttaaaagtcgttttaggactagttgcttcttttgttgaatcatctgtagcatcatttgagcttccacaacccgtaatagttaaaccaaatgccagcactgctaatgttaaaacttttttcataatgatcctcctaatgtattgatttgatcatccaaatcaacctacaaattaaaaatacgataacaaaaaaataaatgaaaaactattccttccaaatcggaagacatccactcacagtaatttaatgcataaaaaagaaacatacgtattcgtatgttctccagaataatcctctagtagtgattgatttcacatttaacaatagaagagatttggagggaaggattcatttacattcttagaaactctaagtttgcttgttactcattgtcatagatgcaatgcaaacattgccttcacccccaattgtttttacggcagtcttcatgtagaagtatataaaaacgttttctttattacaatactaacttattataatctttataaaagaatagattatcagaaatagaaaagacagaaactcttgacaacatatagatgtacatctatattgtaaacatagatgagtttctatgtaaggaggaatagtattatgaattatgaagatatgtccaaaactttaaaagcacttgctgatcctaaacggctgaaaatcatcgatcttttgtcatgcggcagtctgtgtgcttgtgatatcttagatcattttgattttacacaaccaacactttctcatcatatgaaagtattggaaaaagccggagttgttcttgtaacgaaggaaggtacatggcatcactatcaactaacagatgtgtttatcgatcaatttatgggttcaatgatgcaattattctctgctaaagatgattgcatttgtaaaaaaataaactgtgattgtaaaggagaaaaaagtgatgaaaaaattggaactatttgaaccagcaatgtgctgttcaacaggagtctgtggtccatcagtggatgaagaattattaatggtgacctcagtttttgaaacttttgaagggatcgattcagtggatgcttctcgccataatttaacgagcgatccagacgcgtttgtgaatcaaccaacaattttaaaactactccaagaaaaaggaaatgatattttgccagtgactttactagacggcgaaatcgtaaaagaaggatcatatcctacactagaagagtttggaaaatatggtgatgtccattttgttactcaaccagccggtaattcaggcggttgctgcggcggaaatagtgggtccgaaggctgttgctaacagccttctttaaaatagaataaggaggagatggaatgcttcaatatattccccaaaagatgggattaacaaaatatctgtttttcacaggcaaaggtggcgttggtaaaacaacaactgcttgtgccacggcaacatctttggcacaggagggcaataaggtcatgttggttagtaccgatccggcttcaaacctgcaagatgtttttcaaaccactttgaccaacaagccaactgcgattgatggaattgataacttgaaagtagcgaactttgatccaatcactgctgcggaagagtataaagagagtatcgtcggtccatatcgtggtattcttcctgatagtgccctagtcaatatggaagaacaattatcaggatcttgtacagtggaaatcgctgcttttaacgagttcgcgaactttttgactgataaagaagtagcagaacaatatgactatgtcatctttgatacagctcctacgggtcatacattaagaatgctacagttgccttctgcctggaataatttcctcgatgaaaataccactggtgtttcttgcttgggacaattatccggcttgggcgacaaaaaaactatgtatgaaaaagcggttgaaactttgagcaatgctagccaaacgactttgattctagtcacccgtccgcaagcctctcccttgattgaagcagagcgtgcttcagaggagttgctaaaattgggaatcgaaaatcaaaaattagttgtgaatggtctattgattaatcctgatgatgcgatttctcaagtaatttattctgaacaacaaaatgatctaaaagaaatgccagagccgttgagtaaatttgatacctactacattcctcttcgcccttacaatgttactggtgtagataaactccaaattttattgagcgatcaacaacctactattttagaacaggcacaagaacatgctgagtttcctaatttggatgcgatcgtaaatgagtttattcgcacaaataaaaagattatctttacgatgggtaagggtggcgttggtaagacgactgttgcaattcaaatcgctgagaagctggcacaatcaggtaaaaaggttcatttggcgacaactgaccctgctgatcacctaaacttgtttctttccaatgagctgccaatttcaatcagtcatatcgacgaggagaaagaactagaggcttacaaagaagaggttctttcaaaagctcgtgagacgatggacgcggatgatgttgcttatgttgaagaggatcttcgttcaccatgtacacaagaaatcgcagtatttagagcttttgcggaaatcgtagataaatcagaaaatgagattgtggttattgacacagcacctacaggacatactttacttcttttagactctactcaaagctatgcaagagaagttgagagaagctcaggcgaagtaccaatgtcgattcaaaagctattgccaagattacagaacggaaatgaaacggaagtattaatggtcacacttcctgaaacaacaccggtttacgaatcaatgcgcttagatgaagatttggatcgtgcaaaaattgcacatacatggtggttagtcaatcaaagcatgtacactactgatacgtccaacgaggtgttaaaggcacgtgctgcgaatgaaatcgaatggattaacaaagtaaaacatctctcagatggacattttgcagttgctgaatgggtcccaaattttgatgcagaattagttcattaatttttttgaatttaatatagatgaatctctatataggggttcatctattaatttgcgaaaaatttagataaaaagtgaaaagcaatcaagtcgcctatggatattgttcgattagccatcacaatgctatttcattttcaaagaatagtacaagctatctgatcaaaatatcgttgtcattcactaccgagattcaagttcaaattgcttaagtgagtgtttttttaaagtttaaaaaaatttttcaaaagaaggcgcaagccaataggaggaaatagatgagttctaaaaatgataaaaagggtttaggtatttttgaaaaatatctgacgttatgggtaattttatgcatggctgtaggagtactaattgggaaattcttaccgggtgttcctgatacattaagcaagtttgagtattatcaggtatcaattcccacggcaattttaatatggttaatgatttatccaatgatgttaaagattgattttacaagtattgtaagtgcagctaaaaaaccaaaaggattagttgttacctgcgtgacgaattggttgatcaagccatttacaatgtatgctatatccgcatttttcttctatgtagtttttaaaaatcttattcctgttgaattagcgaaagagtacgttgctggtgcagtcattttaggagcagcgccttgtacggccatggtatttgtatggagctacttaacaaaaggggatgcagcgtatattttggtacaagtagcgatcaatgatctaattattcttatattatttgcaccaattgtcgcttttctacttggtgtggataatgttgttgttccaatgggaacgctactcctatcaacgattctttttgtggtagtaccattacttctaggttttgttactagagtattgataatcaaaaataaaggcaaagactatttcgaaaatgtttttctaaagaaatttgattctgtgacaattgtcggtctattgctaaccttaattatcattttttcttttcaaggagaaaaaatactggcaaatccaacgcatattttattaattgcagtcccactaaccattcaaacactactgattttcactattgcttatggatgggcaagattttggaagttacctcatgaaattgcttcaccagcgggaatgatcggagcaagtaatttttttgaactggcagtggctgtagcaatctctcttttcggactacagtcaggggcgactttagcaacagtggtaggagtgctagttgaagtacccgtaatgttgctactagtaaaaatttccaataatacaaagtcatggtttgcaaagtcagatgagattaccaaaatggataatctgtataattgattgagaagaaagctttgataggtgtagggaaattaattaaatagcaaatcgttgaggtaataaaacttatgtctgaagaaaggagagcagtcgctagattattagggatgtcagtgtcctttattctagcaaaattattacactatccaattagtctcggaatatttatcaactttattacgctaattttggtactctatttattagcaaaaaggaaagaaaggcaagaaaaatagagtcatgtggtcgattgaccacatgactttttacagtaatcgtattacaactattttgtttataaagaggcttattatgaaaggaaatttttaatggcaaatgcactagaaatagaaaatttaaaaaaagtatatgcaactggcgttgaggcgctacgaggaatcgatctacaggttaaacaaggcgatttctatgcccttttaggtccgaatggtgctggaaaatcgacaacgattggaattatcacctctctggtcaataagacctctgggaaggcaaaagtttttgactatgatcttgatactgacttagaaaaggctaagcagcagattggtcttgttccgcaagaattcaatttcaatccttttgagactgttcaacaaattgtagtgaatcaggcagggtattatggcgttccgagaaaagaagcattgaagcgcagtgagaagtacttgaagcaatcaaatttgtggggaaaacgtaatgaacgtgcccgaatgctttctggaggaatgaagagacgacttatgatcgctcgagcattaatgcacgaaccaagactgttaattttggatgaaccaaccgctggggtggatattgaactgagacgtgaaatgtggtcattcttaaaagaattaaatgaaaatggaaccaccattattttgactactcattatttggaagaagctgaaatgctttgtagaaatatcgggattattcaatcaggagaactgatcgaaaataccagtatgaaagaactgctatccaaattacagtttgaaacatttattttagaccttgcacctcataatacagcacctaagatagaaggttatgagtattatttagaagatgatctgactttatcggtggaagtagagcgagatcaaggagtaaatgatgtttttaagcaactcagcgatcaaggaatgaaagtcttatctatgcgtaataaatctaatcgtttagaggaactatttttgaaaatcacagaagaaaaaagtctaccggaggaaatcaatgtttagtctttactttaccgctttaaaaagtcttgccgtcaaggaaaccaaccggtatctgcgaatttgggtacaaactctggtaccgcctgtcataactacatcactgtattttattatttttgggaaaatgatcggtggtcgaattggagatatgggtgggttctcctatatggagtttatcgttccaggtttaattatgatgtcagccattacgagctcttatgcaaatgtttcttcgtcgtttttctctcagaagctgcaaaaaaatattgaagaactattagttgcaccagtaccaactcacattatcatttggggattcgtcattggaggattaggaagaagtcttctggtgggaacacttgtaacaattgtttctttattttttgtaccactaaatgtgcattcatggattattgttattctcacattgttaatgacagccatcctgttttcattagcaggtttgataaatggcgtttttgcacaatcttatgacgatgtgtcaatcgtaccaacttttattttacaacctctaacctatctaggtggtgttttttatgcgatatccatgctgcctcctttttggcaaggtgtttcgaaaatcaatccgattgtttatatgatatccgcgtttagatatggatttttaggaacgaccgatgttccaatagccgtctcgatcacaatacttgttctgttcatttcagttctttatactgtttgttactatctagttaatacgggtaggggattaagaagttaaatcatatcatcaatatcacttgattgcttctttataacttgtaataatgcactgaataaaaaagtctatcataaatagattgcgaaacgaaaaatagaaattagctttccattattgattggaggaaaatgatagtgaaaaaaatttactttttatgtacaggcaattcgtgccgtagtcaaatggctgaaggatatggtcacaacttattatctgattcagattttgagatcagaagtgcaggtattgagacacatggactgaatccaagagctgtgaaagtaatgtctgaagacagtatagatatctcaaaacaaacgtcagatttgattgatttggattattttaatcatgctgatttaattattactctttgtggtgacgcaaaggacaaatgcccaagggttccaaagggcatcgaacatattcattggaacttaaaagatcctgctcaagcacaagggacagaagatgaaattttagcagaattcagaagtgttagggacgttatcaagaataatataaaaagtctatcttcaaaataagccaacttataattgtttgattgggattttcattaccaaaagaaagtatcatagtatgattgtgtgcaagacatccgatttaggatagtagatggagagaaataactgtattttttagcgaaggaggaaaccgatggttgtagagattagacaaatggtagaaagcgattggcctgatatccgaagaatctatattgaagggataaaatctggtgaagctacctttgcaactatttcatctataccgaatagttacattgattggcaagctgagcattcatcttttggtaattttgtagctgtagaaaatgataatgtagttggctggagttcgttttctcctgtatcttcaagatgtgtctatagtggtgtcgtagaaatcagcatttacacagaagaagctcaacgtggcaaaggtattggcagtacactcatgagtagtgcaatcaaagctagtgaagaaaatggtatttggaccattcaagcaggtatatttcctgagaacgaagctagtttgaagctacatgaacggaatggttttcgaatagttggtagaagagataaaattggaaaacttgagggcacctggcgggatactttacttctagaacgaagaagtaaaattacaggaaaggattgaatgatttctttgtgaagcctttggtctaacttataatcaatgccaatacgtcatcaaattcttcataaaacgggtcaatgtatattattatgaaacccaatcatactaacaagtgattgggttattttttgcctaaaaaaagagctcaaacattgatgaatatcctaatagaaatgatatttcacgatttactgaataaataccgaaaggaatacagatactttgttgataattgattgacgagaagatgaatccacatagtattttatttgattatttgagttaaaacgcgacgactaatctataacattcaatttaagtagcatttatgcactcatttatctctacaacaagtaaattgatataatggctttatggttattgatttattattatagaaaaagataagtgtgggggattgaaaactatgttggataaaaggcaattagagataatgtcaattaatttcttaaaaattactcttactcaaactggatatcttaatccatttttaaattctggggacacagaaccatcctgggacggttatatatatgttctagaaaaaatgaataagtataataaaaataaattagggaaagttcccgttcaggtaaaaggcaaatatagtgacgatttaagtcaaagcagaatttcttttttagcagaaattagggacttagagaactatttacaggatggtggagtactttactttgtcatttacattaatggaaagaatgacgtaacattttattacgctcaattagaaccaataaaaataaagacaatattggagtcaagaaagaactcgtcaggaaagaaaagtatagagcttaaaaaacttccttctgatactattgatattgtaaatatattcaagagttttttgtttcacaggaagaaacagatgagttttattgatggtgatctatacacttttgagagtcttagtaaggatcataagaaggtggagttaacattcactttaacaggcttagctcttcaccaacacaatatgcaaaattacgttgatacaaacaatgtttatctttacgcaaaaattcctgaatcacccgttttaataccactagctggagagctgaaggaaataattgaaatcgaaaaaactaatcttgaaattggcataggagaaaaggttctatatactgaacagattagagaaaagcagcgtggtactgtcactttaaaatttggagatagttttgagttcgctattaacgaagaatttagcaagcagacttttaattataaaataagcgattttgcgaggaaagcacttattgatatagaatttctgatctcactttatcagaataaaggatttacagttaatggaaaattccttgatttatcttctgcaattaaatcggggccgcattttgattttgaaagatatgaaaaatcacttctgcactgcaaggaagtagtgaatctattagattatttaaacatttcagatgatattgattctagtaaactgtctgaagtagaatggcgcgatttaaatattttaattgcaggattaattaagaagcaagaattggcattaaaagaaactctccacactataactattttaaagcttcagaattttagtattccattaatgattagtttacaaaaaagtggtaaataccttattgaagatatatttaaagctaaaaaaagctgtctttatcttattttcgatggagaacattttaatttaccaatgtttagaggactaacagctgagcaacttgctgagtgttcaacaattgatttcgaagtacttttaaaggaatatcaaaagctacacagtgaaaaaaatgatattctattcgatgcaagtcaatacatgttggttttgattaacgctgcagatttttgtacggataacccagaaaggaaagaatctttcttagacgcagctttaaattttaatcactggttgcaagaagaaaatctcaaaatggaagagacaaataatcaaatactgatgatgaatgagcttcagattttcaaacgtaaacgtgcattaactgaatcggaaagtgattggttgtatgatattactgattcaaatgatattgataagacttttaaatttggagcatatgtcttattagaagaaagaaaacgtgctgagagaatcttttcaacatttagtaaaaaagaaaagcaagactataaaagttacccgatttataacttatacgaaaaattattatctaaataaaaaacagggagatcaattgtatgcctaatataatagtaacaccatacgaggctaaaaaacgcttacgcaagttattggaagaagtaaacactactcatcaagaagtagaaataattggagataccaccgaagaaagtgctgttttgattgcactatccgattggcgggctattcaagaaacactaatgctcatgaaaactgaaactttagcaattgtgaaaaaacgagaaaaagatggaacaggatatacgagtatagaaaaaattaactgggataacttgtaataaatagtcattaaaattaagtgacaaatttctgccaaggctgatattctcattagttgtagtaattatacgagaagaagcagtaattgagatattacaaaaggaactgataattaagctaaatgaagttatccttagtttatgtaagaacaagaaaaaaattatttctaattggactttaaaaaacaagcaaaatctgcgactatgataatcgcagattttgcgagagtgtaatataaaccgtgtaagtaaccattaatcctaggcaggtggttgcttcgcggtttttctttttctacaataagatcaagaggtgagtacacgatggctagaaagaaaagaaatcctgatgccgaaaagttagctgaatccattctgaatgcctatcaacctgaatctgtcgatgacatgcaagatgctttgaaagatgtgtttggtcccctttttgaaaagatgcttcaaggagaattgaataatcatttaggttatgatgcccattctaaagagcctaaggaacacgataaccgtcgaaatggctatggaaataaaacacttaaaaccagttttggtgaagtagctattgatgttcctagagaccgggaggcttccttcgaaccagagttaattcctaagcgaaaacgagatgtttccgacatcgaagggaaggttctttccatgtatgcacgaggaatgagtcaacgagatatcgccgcaaccgtcgaagacatttatggctttgatatttcccatgaaatgatttcagacatcactgacgctgttcttcctgaattggaagaatggcaagcccgtccattggccaagtgctatgcttttctattcgttgattgtatgtatgttactttaagagaaaattatgaagccaaagaatatgctgtatacaccattcttggctatgatctcaaaggaaataaggagattttaggattatggttaaatcaaacagaatctaaaaatcgctggatgcaagtgttcgatgaattgaaagcacgtggtgtcgaagatgtttttttcatttctatggatggggtttctggtcttgaagaaggcgcaaaagcgatctttccatcggtaattgttcagcgctgtattgttcatcttgttcgaaatgcattgcgctatattccaagtaaggattataaggaagtctgccgagatatgaaaaaattctacggtgcttcgtctctaaacgctgcacatgctgcttttgacagttttcaaaatcggtggtctcattattctggtgctgtagatgtctggaaacggaactttgcacatgttgaacaactatttgattatggtagtgccattcgaaaaattatgtacactaccaatgcggttgaaagtgttcactccagcttcagaaaagtcacaaaaaaaggagcgttctctaatgagaatgcactcctaaaactactttatttacgcacgaaagaattacacgcgaagtggtcaggtggtcgaattcaaaactgggctatggtgcttaatcagttaatgatcaacgagaccttctcctctagaattgaaaagtatgcgatttaccttccataacaacggtaggtttattcaactatgtgtccaattaaaatttatctgattttaaaaatagccaagagaatttgggttgttaaaaactcttaactatttaacttccacagtttagttgacaaccccgattttgcttgtttgatttactagttatgatcattatccaaaatactatcataactagtattgagaatttccttaattcctcgtatttgatccagcttaatatgctgctggcctcgttcaatttttaccaacgtttctcttgtaatatttatatccatcagttgaagttggcgtaccatttcagattggcctattcctctatcaattcgcattcttcttatattttttcctattgtattgtttttatcactaataattttttctggcattatcaatatatcccttgaactagaactagttctttttaaaacaatcataagaaagctatgtgataaaatgggactagtatgagtccacttggattttttatttgttctcttgaatcacttttatttatgggaaatattgtctaaactttaaaaggacattagggagatgattaagtgtatctagcagagaatatatcatatctaagaaaaaagaagagccttacacaagaacaactatcagacatcttgctagttacacgctcaactatatcaaagtgggagagcggaacctatgagccagaaatcaactcattaaaacgtctttctgaagcatttaatatcagtatagatgatttaatcttcattgatttaagaagtagagatcaaccaatctaaaaaaggtggaataaggaccattgaaaagtagaagaagaaagctccaaattaaaagattgttacgtgaaagaaaaatgagtgataaaaaaaacgatgggtattcctgtcagttttcagaggatgtattttttgaacaatacaaaatctatgtagaggaaatcattgagaagtatttaccggctgatgaatgtcaatacgaggaatttgctgacatgatagcagatagtcttcaaaaaaaaagaaatctattgcagctaaaaatgataatatctacaaaaaaaatagactgtttcttagatttgctacttgacaatagcctaaattttaacgtggaacttttctatcctgaaggaaggatagaaaaaaatggtccactctcaaaagtgttgttcaagaattatcaagttattatagatggctatcgacttcaaactcttactatcaaaaaattgaaagataaattaaaatagttatgtagattgtaaatttaagggaggttttggagatgatgatagacggaaaagaaatagaattctttatcaagagcgccaaagttccagaaaaatattatagtgtgttaatcagagaagtacgattggccttgaacagcctgaatttcattaattacatacgaactaaaagatcagcttctactgattcaatttattttacagtcaaaatgaaaaatatctctgaaatctatattttatccttacgtagtcactttcctaaagaaaagaaagaaaattacctatatttctatacgccaaggttcgaaagcctttcagaccttcagttcagtattaaaactgacctaacaaagatttataataaaagagctaaggaactcggttttcatgtatcagaatatcctagtaagaatgttctgactaaaccaaatattaataggaagataaagaaggaaccggtaacgaaactcaaaggaacaagagctcatttccaaatgctgcatcagcaatcatttgaggactttttggacgaatttgaaaatcaaaaagatgaataataaaatttgaaatcttaagtttcgtacctcgtcaataaaaaaagtaattaccgacatttttaaaattagatttattggtcacactaatagattataattcagaatcaaacaactgcattcatgtttgattctatttttttacttagatatctattctcttagcaaaaagatattagatttgctgttattatcatcaaaacgatgtaaagtgatacttttctgaaatagtttttttaatatcaaataaaaacctataaaatgatacttttaaaaacaaacttatgttcaacgtttccttttcatgataacaactgtgttgatacaaatgacactattaatgaagtattgactggaaaaataaccgacaaacaagtaacttttttcatcgcgaaaaatcatagtcatacgttatttatcttgggaaatagaaaatcgagaagactaatctagaggaaacataaattaaagagattttatgtttcaaggtcaaaaatccgactaattaaacggataatcttttttataaaaaaatttctattaaaaaaagtatattgtttgacgatactatagtaaactaaaagataacgattgtgatgttaccaagaaaggattgattgtcatttcgttattttatccgcgtttttctgtttacaagcatcatctagttattcaaggcaacaaactaatttcaagaaagtttatagttttaaaaaaacaagatcatttgctagctttcactaactttcacaagtatatcaaatcgggtaacagaacagtgaggaatattaatgatgacggaaataatcgattttactttgttgtgaagctgctgaattacgcctttttcttcgaacaatgtcaaagtcttgatcaaattactgtggaaacaataaagaatttttttaatcactatggaaaaggtactttacccgaggatgtggaaggttctggacggacaaaaaaaacagttgaatcttgtatttctgcagtccttgatttttttgaactgtttattaatgatcgaaaagataaatgtgcaattaagattgaagaattgtacaaacatgttaattatcgcgataaaaaaggaactttaagaaagaaaaaggtgcccgtatttgatgtgttgtatataaataaacatcgagaaattttccgagatataccaaataatgcttttgagatgctcttttctcatatcgctgaacatcacaaagagttgattatgctcgtaactttatcagcatttgcaggcttaagaccttcagaggcttgtaacgtcagaagagaagacagtaatttaggtgcaggattattttttgatatttatgatagtgaaatacacaaaattcaaatagatataagggaagaactgaatctaagaagtgatttaaaatcaattggcaggataaaaagagaacgcttacaaacggtgccgttaatttttacagatgcattttatagtagttatataaattatatgaatcatttagttgggaaaaaatatgaatgtcagtttggagcattaacagtaaataagcagggacgagctatgacgtatgacagttactatcaaaaattcagaaaaattatcaaggaagaaatgattccattatatctttctagtaacgatgctgaaacagttttttatggccggcttctaattgagaataatctgtcacctcatgttttcagacattggtatacagttcaacttgttttatcaggtatggaaaatgtagctgaattaatgcatgcgagaggggatagctctcccgaaagttcatttgtttatcttcaaaataaaggcgagctagaaaagcaatacaaaaaagtcaatgatgagatgtttaattacttgacctgggcagcagctaaaaaaaatggtggaagtaaaagaaatgattgatttaaaactatttgctgaagaagttttaggtggttatgaatgctctagtatggaaggaaaacaaaaaatgattactttcttggaagacaacaactggtttggctcgaaaccagtcttggtcgatggaaaggtgatgctcacttctgatcaggtgaaactgtatagtgaacctctaaagattttttttgctgcacaatcatcaaaagtgaattatgaaggaatgattacaatgttacgagccaaatttcccgagacaactaatcaacttactgttttttttgattctgtagaattttatgacgaagcaatgttctatatttcagatttcttgctttattcattaaagaaagatattttccttatggatgatcaagaaatttccagtcttatggaacttgctattaatgatttaataaaaagtcatggtttagtactaacattctttttgtcttggctaaaagaaaactacaaaactgcatataaaaaagaatatttcatgaagaatagatattctatggctcagtcaaaacaagcctacgattttgatgaatatttacaacttttatattatctttttaacgaagaatatattaagaaagaaaagatgtatgagaaagcaacaaaatcaaagaattatgcagatacgtggctttttttatctttacacttcatttgttcactcagagttacggatatggaaagaattccacatccgactcttttaaaatctccggttaatgtactaaaacatatagaaaacaatcaatacgatgattcagaagctaggcaagtgttgttatctataaccacaagattatgcgtattgcctctaacccccagcaaaactagtggacaaaaaaatatttcgcaaattaagttcaacgttcccgagagttgtgaggttcatattggaacgctcttaagcatctgtgaagctcattcatgtttagcagatacttttgaaaaatctctgattcgaaagatttcagattatgatcgaatttcgagatacatgggagaagagattggatcattatttttagaatcaaatttcagatctcgttcagcaaataagtcctatttgcaatctctttacatccttgctgatgatatgtcgagtaagaatgaaagtgtaagaattaagggctatttactagcctcaattgctagaagtcataagggatcttacggaaaatttgctggagtaacagctgaataccttaaagatgccaaaatgaatggtctgtcagctgaatttgttgcaaaagaactttttgaaagaggcgtactctcatttgttccgtctatgcttttaaagattattaccgagggatcatataacgatttatcctttagtcagcaaacgcaaatgattcaaaaattgaatctttctcccaatgaaatagaacaaaccgtagaaattgtttcaaaatcaaaacgccaatcagaagaaatagtggaagaactcttgctttcaggaaagaataaagatgatattctcgaaattttacataagatcggtacaggagcagctttttctaaacaatccgagagtctttgtctgctaacggctataaataaagtctgttctttcgataatcgaactcaatgcgttggttgtaaatatgaaataaaaacaaaatcaacgatgttgttattagtcagcgagtataagcgtgtgtattctttatatcaagaatcttctgaagaaatagagaaagaaaagtataggcagcttttaatgaagataatccttccctgtttagatgaagtattgctttgtctcaaggatcaatatggttcatccgtttttcactcttatgagaaattaattaaggagtatatttaatgaactcaagttttcagtcggaacaattattcgacacatttctaactatacaagaacttagtcagagtaacgtcgatgaagcaaggaaagtttttcttattttttatgaaaaaggcgtatttaaagattgcagctttgatgataataaatggaatggcaccgatgagtattccaatgttgggataaactataatgtgaatcgtttttgctatgaaagaagctatcaagatatttttcgtttatcttatgaagagtttgtggagtacttaaaggttttcgttgcatttactttagggaaaaatgtgttaaaaactttacaaacagtggtgaatgacattaagagaattataaagactgaacgaaaagagttttatggcgctacggctaatttaaaaattgcgacacctagtttgtgcattgatttcttttcaatactcccaaataacagcgataataaaaacgttgaaaaattgattgatgtactagaattttatattacagaagattttaaacgaggagtaaagaaacagcgtagtcttgcacaatttgacagctattttctcttcaatgatatattgagtgatttttggaagcgagatatcagtaatgacacacgtctcttttattatccgatctatttatggtggagaattactgcaattattccattgcgacctaaggaattcattttaacaccacgaaattgcttaaaaaaagaagatgatggttattacctcactttaaaacgtaacagactgaaaggaggcaataaagaggtttcatataaaatttcaactgattattatgatgtgacatacaaaattccagaagtactagccaatgaaataatgaattatcatgatttcactaagcagtatgaaaaaacgcagatagatactttttttgtatctgatcctcattacaaaaaatggcgtcaaaaaaagcatttaaatagtagatttcttacttatactaacatcaatacaattatgcgctatttcttttatgaaattatccaaaatgagtacggcttaaagacaatttatggtcgaagtgaacggcatcttaagcgagatgagattaattatattcatttgggagacactcggcatttggcactaattaatattatggctgaaggaggaactccagttacggcaatgttattggcagggcatgataatatcgaaatgtctgcccactattattcaaatattacaaatttgattgaatgtagaacgtatcgtcaatatagacagatctctctaggagaagttacttatcaactaagttctctaaaaaaatttcccataatccgagaaaataattttaaaaaattaagccatggtgggaggtgcttttccgaaaaattttatattggtgattattccgattgctttgcattagctagtaaagaaggcgaaatcggatattgtcctgactgtaaattctacagaaaatctagtagttcttttttttccaccgatgatggtttttataaacgaaaaattgaagatgattgtaaaaagttagaggatgcaatccatttagttcgtattggaaagggagatacagaagatattggtgaggctctattgaacttgaaaagtagttcattttcttatcaagaatatttcgaagaaaagacagctcgtttccatgctaaaggagaaaaaatatggcaagaagaagactaataacagacgaagaattactggaacatttaaataactatattgtaaatttctgtgatggacgtagtgatactgtaaaaattccagagtttggtacttatttaagaaaaaatggttttccaaaagtccaagactatttgattcgaagaaatatcacaattaggaaatatttaaatgatgaaagagaaagagggacaatttcgaatcgacatacattatcaacatatcgcactcttgatgtagatttatttattaaaactaattgtagtaattcctctatgaaaagggcactgtcagagttgaacatatatcatcgatctatatgtgaagcggcaactattttaaataaggaaagcaataccgcgattgaaaaaatggaagagtataaaacaaaattgactaaacttgaaaaagaaaatttagagatttctgtagataataagaaacttaaaagtctaaacaaaagcctcacgtcgctaattaagagctacaaaacaataattgagacctatgtttatccggagattgcaaacgaattattgatggaagacatgttgataaacgaaactcaaaaaataattaattcggaaattctttctgaaaagataataacagcacaaactccaatcaaatcagagagtaaaataatacaaggattattcgcggatcttgaaaggtagaccaatgaaaaagcagtttatatctttaagtaaaaaaaatccagaagctgcaaaaatgtgggcttttgatttgaatgacaaatccctatctcccgaaaaaatcggagcaggttcagataaaatagtttttttccgttgtctaaaaaatccaaatcatgtatttaaaaaaagaatctccaaaatgagtagctatagagatggtcataatgttggatgtatctattgtggcccaaatgcaaaaaaagcctttgcaggagaaacagatttactaacaattttccctgaggcaaagaaattgtgggactatgaaaagaacagaggaattgatcctacaagcctattgccaaaatcgaaaaaaaaagcctattttagatgtgaaaatgggcacagcttattaaggataatagccaatttcagcgcctctccaagttgcacagaatgcaaaaaagaaaaatacaagttgatttctcgcacccccaacatatgtcacttttttattccttcaaaaaatctagatattattcttagtgaagaatctgtttcttctgaaaagaaagcaatttttcaatgtccaaaatgccattacgaatggtcatggcaattctctacatggctaaaatatgcgttgtgcccttgttgtgggtttgatggagaaaacaaaagcgagaaaaagaatcaaaaaatcgttcaaaaatttaatataaaaactttgaaacaaattgttaaaaatattgaggacttttgggattatgagaagaatcaaggtttaactccttcatcagtatcacatggatcaaataaatctgtttggttgaaatgtgacaaagggcattccttctctcgaaaagtttatagtatttctgataatagtcggaagattgtcgtttgtccatattgtacaaatagtttctcgaaaattacacctggagtaaatgatttattcactgtttgtaaacctgcaaaggaaatgtgggatcatgaaagaaatcaagaaattaaagatccaacgaaactgtcgtattcttcacgagaaaaagcgtggttcaattgcaagaataatcattcttttagaaaaagtataattactttttttaaaacaccggaatgtcctacttgcaaatttgaaaaaaaatctagtattcaatcattgaaaccagatttaataaaattttgggattatgagaaaatgaactacttaccaaatgaagtcagtgtacattcaaaggaaagaggattttggagatgcagtgactgtggatatgagtggactcaaagtttttgtaatagaagagaggcaaaaaaaagtttttgcccaaactgttattcagatggatcatgttcgaataattttcgcagtagtaatccagccgcatcgaatttttggctagatgataaaaatcaagggattacacctgataatgtcactcgaaaatcaggaaaaaaagtattcttaagatgtccaaatgatgagtcccatatatttgagaaaactatttatagtattccagaacaatcgccgtttggctgtccattttgttcaaaagtaaaaacagtggttggtcaaacagactttttttcctgttgttcaaaaggaaaaagaatgtgggattgggaaaaaaattttgatttagatccatattctctttttcgaaattcaacaaatctcgcgtggttcaaatgtgaaaatggacatagtttctcaaaaaaaatagtaaactttagtaggtgtcctaaatgtccaatatgcatcactgaaaaccaaaaagttgtatctgattatccacttttgctaaaacagtggaattttacaaaaaatgctgaaattaatattaattcaacttcgcctaactcaaaaaaattagtatggtggttttgtaaaaagtgtgaatatgaatggcaatccgaaataaaatcaaggaaactatctaaaggtgagtgtccttgttgtgaaaccagaattaaagttgttgcaggaaagactaacttgttttcaattgtacctgaacttgagaaatactatgattattcaaagaataaagacttattgatcgaagatttgtccatttccatgaacgatagaatagaatggaaatgtccagaatgtgactatgagtggaaatcaaatccttcttcaaggtatgtgaaaatctgtgaaaaatatgaggtaaaaaaatgccctaagtgtgtaagaataaatagaaatgaattctatataaaagaatatccggatttaatttcaagatttctatatgaaaaaaatgagataagtgtttttactgctgataagatacagcttaacaaagaatactggtggaaatgtgttaacggatgtaagcgggagtttcgtagcacaattccttctatggtaaggtcccaaaactcagtttataagggatgtccatattgttcagggaaaacagttagtattgataataactttgcggtactacatcctgatcttatggatgagttttcaccggataacctaatggatccatataatattgctgagttcagttcaaaaaaagcaaaatggatatgtcgtaataatagcgaacatgtttggttcgcgccattccagagacgggcaatcggggaagggaattgtaatttatgcagaaactatcactacggtaagatgttttataaggagcaccctgaattaaaaaagtattttgacactgataaaaatgaaagagattttagttcttatacgaataaatcaaacgatattgtttggtggaaatgtgatgaagggcactctttcaaacgtcaattatataattttaaagatgatgaaacttttaagtgtcccatttgtgaaaatagcattgtagtttctggcataaactctctatgtgatacaaaacctgaattgtctaaagaatggagtaaaaacaatacgagaccggcggaagaatatagtgatacctctgtatattctgttctgtgggaatgtcctgattgcaaaggagagtactcacaagtaataagaaaccgtgattttggggatgatagttgtccatattgttctaacaagaaaggtctattagggttaaataccattgtggatatgaaacccaagttaatttcggaatggagtaccaataatgaacaatcaatcgaaaaatatagttataaatcattatttgctgctctttggatttgttcggattgcaaaggcgaattttctgctcctattaaagatcgtgatttcggtgataaaaaatgtccatattgttcaaatagagctgctctgaatggctataatactttgaatgatgtaaaaccggagctagttccagaatggagtgctaataatacgcgagagatatttgagttttcatttatgtcaaactatcgagcatggtggacctgcgaaaattgttcaggagattttcaatacgaaataagaagacgttattttggtgatgatgcatgtccatattgttcaaatagaattcctttagagggttttaatactattcaagcagttaagccagaattggtaaatgaatatagtgatagtaacgaaagagatatttctgaattcacttttcaatctgtatattgggtattatggacatgtcaacgttgcgaaaacgactatccagcgtcaataaagaagcgtgaatataatgacaatagttgtccttactgtaataatagaaaaccacttaaaggattaaacactgtggcagatttgaaaccagggttattatccgaatggagcataaataatgaaggtactgcaactgactatctctataactcatcctactttgttctatgggagtgttcagaatgtcatggagaatattcgcactcaattcgcgatcaggagtgtggcgatgatagttgtccttactgtaataatagaaagctacttaagggattaaacactgtggcagatttgaaaccagagttattatccgagtggagcataaataatgaaggtgctgcaactgactatttatatagttcaacacaagcagctttatgggtttgttcaaaatgtagtggagaatattcgcactcaattcgcgatcgagagtgtgacgatgatagttgtccttactgtgctaatagaaaagcattaattggttttaatacttttgaagtcgtttatcctgaactattaccattttgggattatattaataactatcttttgacagatccaagtataattttaccgaaatatgatgaaaacgtatggtggatttgcgaacataataaagatcataaatacctaatgtcgcccaaacggagaattaattttcaaaaaaggaaaaaggagccttgtacattctgtaaaggtttacgcagaaaaaaaaggcattttatttaggttttaatttatagtttgcaatgagaaatgagtaattaccaaatcatcaggtatcagtataagaatattttttagcaaaacaaatagataagaacactgatcttacaaaaaaatagtaaggatcggtgttcttttttttaaagttttgtggcaatgagaaaataaagttcatttacaatagaaaattagattttagaaaatttacttttcatgagaataaagttcatttttcgatctttttgtaaaaaaattttttttacttattacttaaatttttttaactttattgtttcaagtccacaaatcattcatagcatcgcgttttttcttcccagcgatatgagtataaaccgtcgtagcagacgtccccgattgtcccagctgctcagcgacttgtaccaaggaattggttttactgtagagctgtgtggcgacagagtgacgcagcttatgaggtgagattttgattttgaaggcttcggaatattttcccaccattgcttcgactgcaccgccggcgatgcgtttggctttgccgcgataacgagttaaaaagagggcggattcgttttcatctggttgatacagctgttgtctttggttaagataattcgttagatattcgatcgcaatcgaagagatgaccaccatatcccattttccgccttttcgatagacgcgagcttctccggcattcaaatcaagatcctgaacattcatattgaccagttcagccagccgcatgccggttcctagaaaaagtccaataatggcgagatcacggacttggtttttcttaaaggctgtaattgcctggcgactttccaacgtttcgatgtagcgatgttcgacaaaatcgagaaagtctagggcttcatcatctaagaaaagcttcttctcaatcgcggcaccgcgctcggccatggtcttattatccttgacatttgcgacttttcccatcatattatgttcaagataaggcttgccagttttacgatcgatcgcctcattcaaatagctgaagagggagcgcagggcggttacgccacgttgaacggtgacattttgccgcaagggaagggcttgttcgctttcttctaaacgtttcttagtcgattcttttaaaatcttcggcgctttgaccaagtgggctttgtagaactccaaatcctccggccataatgccgcaaactcctccagtgtaatttctgagagtttctcggccgaagaaaagccttcttggatcagccaattcaaaaagcgtcgatattctttggcgtattcatataaggtgatggaagagtattgatcaccgctttttttacgaaaataattttggacgaaccaggggaaatattggatttcttcctccatccgtcgattggcttcttgttgattcatcgctgccaactcctttgtaactaaaagtataagacagcgcgcaagtagtgtcaaacaacagttattttataacgtccaactgtcattgaaacaaaatgttattatcttagacggttatttaataaatagaaaatagttgttcatttttcggaagaaagtccatgttagaaggtttatactattggtaacaaagggggaatccgagatgattacttcaaagaaaaaacaagcagagtattatcacgctttaaaagagagagaccgcagctacgatggcatcttttttgcaggaataaaaacgacggggatcttttgtcatccaacctgtcgagcacgcaaaccgaaaatggagaactgcgagttttatccaacagcagaagaagcgctgctggcaggctaccggccctgcaaaatttgtcagcccttgtcatttccgcaggcaattccggaagaagttcagcttttggtgaatgcagtggaagagcagccggaaaaacgctggaaggaggcggatttttcagcgcttggactgaactccgtcacagctcgcagaaaattcaaagaggtctataacatgacttttgtccaatatgctcgggcccgccggatgggtttggcttttaaggaaatcagtcaaggcagcaaggtaatcgatcagcagctggagtctggatatgaatcagccagcggattcaatgatgcctttacgaaaattatgggaaatcccgcgaaaaaagtcgctgcacgtacgttaaacgcctcatttatttccacccccatcggtcgaatgctgtgtctaaccgatgacgacgcgctctatttattggaatttgaagatcggcgtggactagagcgtgagatcgaagcgctgcgtgacaaatacaactttcggatcatttatggtcaaaccgccatcaatcagcgtgtggagcaacaattgaacgaatatttcaaaggcgaacgcacagagtttgagttgccgctgtttcttgacgggtccccttttcaaaaagaggtctggaatagtttgatgacgattccaagtggcgaaacggtcagctatcaggaaattgcggagcgtttaggagataaacgaaaagttcgtgcagtgggaagagcaaacggctcgaataagatcgccatcgtcattccctgtcatcgagtgatcggacacaacggaaatctgaccggctatgcgggcggattagaacgcaagcagtatttgttggcattagaaatgaagtatcgctaaaaaagagccctgatcggttctttttttagttcaagcggaaaattatcgcggcgaatgctagaaaaagcacaaacagcactgccagcaaacaatagattttccgtttgagttgaagaaatttctccacttcagccggcttcattaagctagtggtttttcgacgagcaaaaagataaagcagcaggccgccaccgttttgtccgccggtagcgatcaatgaccaaaattttggatttttgatgccgcggcttttggcatctagcatgatcaacgaaaagatataataaaataggcagcaggcccctaccaaaagtaaaaccattaaaagaatcatgagcgctgtttggttcataatttgtccctcctaaattttttttataatcagataaaaaagcgacaagctgttggcaccaaccagagcgaaaatcagccaaagaaatacttcattcattaatggatttgctaagagaagcagcatcagtagtccattcactaaaagtagaacaataaaaatcttcaagaagtggttgaccacggtattctcctgtaaatgcttgaccatttctcgatctcccttcaataattcatcgagggaaagattgtaaagctctgataaacgaataattcgctcgatatcagggtagcttcgaccattttcccaattcgacattgtttggcgggtaattcctaactcagctgccacataatcctgtgtgaatcccaattcttttctacgtatttttaaccgttgtccgacatccatttttcatccctcaatcaccatttatcttatctctagcataaaacaaaaagcgaatcctcgcgagaaaaatcaggtaaaaaagcttttacgttcgatagttaagggatttctcttaaagatatagaactataaatatcgcaaatgaaattatatcaaaatctttttatcaaaaactgttgacaattagccagtgaagctctatattttagatagataccaatggtatgtaaggagtgaagccatggcgagaggaaaaaatccagaagaaacaaggcgcaagattctagctgtttcgaaacaattatttcttgaaaagggttatgataatacgtcgatccaagatattgtcaatggtttagatggcatgacgaagggtgcgatttaccagcatttcaaatcaaagtttgagatttttgaaacgattatcgaacctgcggaaacacccgaagaaagtttgcgaaagcatccaggaaataacggattagaaaaattgcaaagcgcaattctagatgcgtttactgattattctcggatgaagttaaattattcagcggcagttaccctgcgcagtccgcgttttatcggagagcaaataatcagcatgtttaacgaagtaattcccgaaatcaaaaaaatcgttgaagaggggatcgcggatggctcgattgaaacagagtttcctgaagaggtcgcggatgtgttgatgatgaacctaaatacgtggatcgggttgcacttgactgtttttactgaggaacagctgaagcgaaaggtactatttactaagaagctattcgatggtgtcggtattccgatcttcaatgaggagatcatgacagaagcgaataagatgtttgcctatttaaaaaaagatagcgaagaataagctatttttttttaaagttatagataccaacggtaggtatgttaatcgatattagttgtttttgagcttgtcgcacaagagtgaagaaagaaggatggttattatgaaaagaaataaaaattttaatttgttaatcgggagtcaattattctccgttttaggaacaacgattgttcaatttgtgatttcattgtatgtgctggatattacaaaatccgcgttgacctttagcgtgattgcgtcgttatcgatcgtagggcgattgatttgtctgcctttctgcggcgtgctggctgatcgcttgccgaaaagaaatttgatgttactgatggattgtctgtaccttgttttatcgattggcctgtttctagtcacacgtttggaaaatccagtaacggcgatcggaatcttgacagtgatcattggaatggtctcggcttttgaaacacccgtggttcaatcagcgattcccataatttgtaaggaagaggagattccacgagcaaacgggatcatcagctccatcggtacattaggaacggttttaggcccgatccttgcgggaatcatttatcgatttgacgccgtttatcaaatttttatgatcacagcagccttatttttaattgcgattttctgcgaagtattgttaaacattccggttcaagcacaagctgcaatgaatgggacgcttttccaggtggttgtcggtgatttgaaggaagtagcgaactatctgaaggcgcaaaaagtcattgtcaaagttgcagcagtagcatttttgttaaacttttttctcgcttcctttattcaggtgatcattccgtatgtttcccgtattcaattaggtgcgaccgacgcacaattcgggttaatgaatacgattctagcaatcggcagtcttttgggaacagtcgtttacggtgtgatcgcgaatcgcttgaatgaaaccagtattaccaaaaatttgattctcgtggcgattttatttagtttattagtcatcccgtttggcctgattcagaattcaacgttggcattttggctgatgacagtcatcgtggcctcagcaatgggtgtagttacagtcgtttcggttcaattgattgtttatatccagttagtttctgacaaagctttgcttggtcggatcatgtcattagtgatgatcgtgaccaccctggcgattcctttaggccaggtgatgtatggcagctttgcggcagcagcgtcgacaaaaatgctgctagtactaatcattgccacttctattgtgaccattttgattgctattttctcgatcagaatttttaagcagatgcgtgtaagcaatgaagtatagtttcaaaacatatattttataaaaagtccaacccatttattttatatttcataatatttttctttaggccgataaccgctgttattggcttttcttgttatactaaaaacaaacgtatgaacttttaaggagggattgtagtgagtttctttagctataaaggaaaaaaaatcttctacgaaacaatcggagaaggaaaaccactcgtctttttgcatggaaatacctcgtcatccaagttatttaaacccatgttgcccctttataaagatttccaagtaatcttgatcgattttttaggctatggtcaatctgatcggctggataaatttcctaccgagctttggaaagatgaagctcgccaaacgatcgccttgttagagcacttaaatattagcgacgcaaatctagtgggaactagcggtggcgcttgggtagccatcaatgcagcatttttaagaccagatctgatcgctaccgttactgctgacagctttcacgggcgtacgcttcctgatgattttgatgaagaattactagcagaacgctcttcaacgatggcggaccctgaagcatcacagttctaccattggtgtattggggaggattggaaggacgtggttgagcgggatacagattccatgtggcgtttgatcatctccagaagagagctgttcttcgattccttgcaaattctgcaggcgccgctgctgctaacagccgctaaaaaagacaaagctattcgtccaaatattgaacaagaatatcaagccattgttggcgaagtcgtccacggtcagttcaaattgttcgacaagcccggtcatcctgcgatcgaaagctgctgcgaagaagtagcagaaaccattaatcaattcatttatgaatatagctaaaaagtatcaaaaaagcggtcaacttgctggaataggactaggttgatcgctttttgatagtttagaaaggtggagaggaaaaagggagctttcaaaaaatgttacgtttgatcaaatcagcgaaagcacggctttatcaactcccagaattcatggtaaaggattgaccgccaaagcccagttttattggcggtatcgaattggaaactatcgtctgatttcagatatcaatgaagaaacggtgactattttgattttaaaagtgggtcatagcgacgatgtttaccaattttaaaaggaaaaactttaatttcgcatcgactgtaacccacaaaaaaataaacaaaacgagttcaatctgtttttcgattgaactcgttttgtttttatgtccaaagatcatcaatcactgatcgtttctcttttttgacgatatgagtatagatttctgtggcagacgtaccgcgttggcctagtatctcactgacggttttcaaattttttgtcttgcgaaaggccatcgtgccgacactgtgccgcagcttatggggagtggtgcgtttgccaaaggctgtggagtatttgtcgatcatcttttcgattgagccgccttccattcgtttggcaacatttttatgtttggttaaaaaaagggctggtactgagtcatcggcattatagagtgtctttcgttgatcaacatattcttgaatgtagtcaataaaaatcggggagatcatcgcatgatccagcgtgtcacctttgcgttgaacctgaacatacagaccttcgtagttgagatcactgacatttgtgttgactaattcagatagacgaatgcccgatcctaggaataaggcgagaattgcggtatctctaatacgatttttttcataagctgttttggcttgacgcgaggtcagttgattgccgtaaccagcatagacaaattccacaaaatcgatcgcgtccgagtccaagtagagcattttttcgattttatctttgcgtaccgcatcagaagcgtccacaccgccattttctatattgaccataatatttcgtcttaacatcgggcgaatcacataatcacccagctgctcgtcaaattcttcgatttcctcattcgataggtatttgaaaagggaacgaagagcagtgatgctgcgttgaacagtcactttaaggcgatgtgtatttctttcactcaaaggagattgagagatgtcattctcagcttttccttcaaaggttcgtttcggtgattgatttaaaaaggacttatataaaacgattttatctttattcagtctttcaaaatcttctaattgaatctctgaaatatcatccacctgaataatttgttcagaagaaagccaggagaggaatcttcgatattctttagagtattcgtacaaggtattcgttgaacgggggattgcttccaaatacaataaatatttttgaatgaaatccggtaatttttcgaattctttttcgtagcgttcctgtagtaattcacgactcattttatttttcagtcctttctttttttgataggagaggggaactctctaactatatgataataggtatataccaatttgtcaactattaaataacataaatatcactaaaatagaaaggggagaacgaatgatgaaatagttgaattactgaaaaatggttctttctataaaacataacgattgttataactgtgtttaaataacgatatattatgataagttgaaagagaagtacatactaaaaaagaaaaaattaaaccgaaatcattattcattcatgcaatttaatttattggttattgggatgttattatcgttaaaagctcgacaatcattgatctatcagcaaactttgcatgcaatagcacttcaggaaaaatagagatatatttctgtctgaaccataaatttgctgcaaattgaattgcttgaataaattaattgagtcgctgaaaacatggctttttaccatttctaacagtttaaaaatcatgctttcgggaaaatagatattgttacgaaaacatgatttcttgtcctgcagcatcttcagcaatcgattagttattaataactgagatgcgtaacatactaattgtgtcttagactattcattatcgtttaaaaaggattctgaggatcaattgcggaccattatcaacctttttatctcaaaattgctcacattcgacatctgacgatcatgatcattttgcagacaccagatcatacaactcatttaatcagctcgtttttgatcattcacttgagtcttacttgtaattcatcgacaatgacatccaaataaaatcttccttcaacttatcagcatttacttcaaatagaaatctgaaaaacgattttgataatacattaaaaaaaatcagctaagtttggtttaaacagatatccggtttattgagctctattttattacttcttttatggtttaagaaaaactaacattattctcaaaccataaaaaacctattctctctcattcataaaaaactattcatagtcggaactttcagtaccatagtcatagttagtataaaaaataaactggctagtacaccatgagccagtttatcatttttatcagaatataccatcaagaataaagtatctttcaccataacgaattattgttcgacatttttattttttacgaagaaataaaagaacgttacaacgtcaaaatgattcctactacaaaattgtatttatattttcgtaactatttttctttttgtcccttttactaagatcgcttgcttattatttatacagcaaagaagcaaattattggcaaagttctctttgatatctttagtaatagttttgaatggtggttcattataatgaggcaaagaataaaattctacaatacctagtccattataagagtttaagtcgagccctttatccggtgtatccattttttcgatatagtgaatagaattcgacaagataatggcaccggcagattctccaatataaagcttgccattttctatttcttctttaataatcgcatctgctccggatttttttagttcttgcattaagtagaaactatttccccctgtaacataaataaaatcattttcctttatcttttgctcaataatgatttgaggctcaacagaaacgtctactacatctacaattgcccccattttctctaaggcttttcttccagctgtcacataagatttgattttttcaacattacttgctgtgggaataaaagtaactctttttccatatacatctttttctagtagtaataattcatctgaaacctcactaaatgacgatgacaaaaacaattttttcatagatagactcctttacaacatgataaactcattatatattctaatggtgtcactttatgatacctatggaggcaatgttatgaataaatctgaacgaatccaacgggaactttttttcgtgaatagccataaagaatttaatctgactgatctaatgcgggaatttcagatttctagaagtactgcaataagagatctagcagagttagaacaattaggagtgccattttatgttgaaaatggaagatatggcgggtataaagttctcccctcctcattattacctccaatttattttacggaaaaagaaatttttagtgtgtttttttctcttcaacttttaaacttgttatctggctcgccatttggtagtaattattctacgattcagcaaaaattattaaatacatttagcgtcgaaaaacaagaaaaaatagcacaagcaactgattcggtacaatatgcgggaatttatcaaattgagcccactaaaaatcttgaagatttatttagcactattttgaaaaatgaacccatcaaaattctatacactcgttatacacgaaaagttaaacgaattttgcctattcgcttaactttaatggatggttattggtattgtattgccatagacattgaaaaaaaagagatgagaacttatcgttgtgattacatagaagatattgaaatagaattggattatccacgccctctctctgaaggagaaatagctaaaattatagccacacaacaaaaggaatatcgaaacattccttttaaagtacgtctatctgataaaggaaaagaacatttcttaaaaaataagtttccaaatatgagactcacagtcacagataacgatagctttattcttggagagtttaataataacgaactaccctttttgaccaattattttcttggttttggcgagcatgtggaaatacttgaaccaaaaatactaagacaagaatatatgatgttgatcgaaaaactattaagcaggtacaaagaatagactttgatacctgcttttaaatcactttgatttccagttacattaaaatacttcttccaagcattattttgattaagcttctaatgctgtaatcacagggaaataaggtaaatctaaatcaattgccactgcttcaattgtcaacttgccattataggtattcaagccgcgtcgtaatgccaaattatcttttagtaagcttatcaaatcattgtttgccaataaattgacgtattccattgttgcatttgacaatgcataagtcgcggtttgcggaacggcaccaggcatgtttgcaacagcataatggactacattttctttgatataagtaggattgtcatgggttgttactttattcgttgtttcgaaaataccaccttgatcaatcgctacatccacaatcaccgaatgaaatggcatacctgaaaccatttcttttgaaactagcgtaggtgctctatgaccaggaatcaaaacagcacctataactaaatcagctgttttcaatacttcttgaatattgtagctattagacattaaggtttggatatttccatcaaaaattagatctaattgcttcaaacgaggaacacttacgtccataatcgttacatttgccccaaggccagctgcgattttcgcagcattcataccaacgactcccccaccaataacaacaacattcccacgtgcaacacctggaacacctgaaagtaatacaccgcgtccgccgttaacgcgttccaaaaaatttgcgcctatttgtgcggccatacgaccagcaatttcactcatcggtgcaagtaatggcaatgagttatcggctggctgaacattctcataagcaattgagtgtactcctgctttcaataacgctttagttaacgacttatttgcggctaaatgcagataagtaaataacaataagtcttttcgaaaatagcggtattcttcagccaagggctccttaactttcaaaaccatttctgcagcccaagcactcatcgcatctggtacgattgtagcgccagcttcttcatactctttatccgtaatagcagaacctagccccgcttttgtttcgaccaaaactttgtgtccaagatttgttaaaccaaatacgccagatggcggtaaagcaactcgattttcattgtttttaatttcttttggaatacctattatcatgaattatcctccttcttttttatactacagaagaacgagtattgctgtactcttcatagatcttttcagcaacaatttttttcaatgtttgaacaactagattgatttcttcataagaggtatataaagcaattggagctagacgaatcacattaggttcacgaaaatctgggacaacaccattatttctcaaggcagccgcaattcgataagcttcttcatgttgcagacaaacatgcccaccacgcactttatcatccgtactattcccatatgaatacccgtaatcagctaactctttatcgattaaaaacattagataagcagttttattcaaagaattagctctaattttcttcattcctagctgattgaaaatttgtaaagaaccttccaaacctgccattgaaaaaattgccggtgaaccaatttgccaaccacttgcatcaggttgtgggtcaaattgatgctttagttgaaattgggtatcgttacgattgccaaaccaccccgctaatcccggctttttatcaaaatgcttttgattgatatacaagccggcagtcgacccgagtcctccgtttaaatacttgtacgtgcaccacacagcaaaatctggttgaatttctttaaaatcaatttcaattgcgccaatcgcgtgacataagtcaaagccaataataattccacgtttatgagcttcttctgtcaaacgcttcatatcaataatctgtgcacttcgatataaaacagttggcaataaaatcacggaaacatcatctgtcattgcctcaattaccgcatcttcgtcaataaattcaccatcagcactttgaataaccttaacagcttcttcaattgaatacccttttatttcgaccatactatcaacagcataacgatctgtcgggaaatttaaatcatcgaccaaaattttataacgatctttcgtaggatgataaaaggttgccaatgctgaatgaatattagaagttgtactaccagtcacggtgatttcttgcggtttcgcattaatcaatggtgccattaaagcagagattttttcgccataaatatataaatcattccaagcttgaacaccttcttttttccagcgctcaatcatcttttcaatccttgtaacggcagctttagaagccatacctaaagagtttccatccatatagatttctcctggttgaataaaaaaatcttcacgatattggtggagctcatcttttgtatctaattcttttgcatatgctaaacctgtttgaaacgttgtattcattttgtttcctcctaatttttaagcgtttcttttgttgataataaataaataattgaaccagcaacaccgagagctgcgatgcctgtcagaatcaataatccagctttccaagaaaagttctcaattattttagaaataattggtgctccgatcacgattgctgtgtaataaaataaattgactaaactcatagaatagccaatcaagcgttcttttccagcagctcgaggaactaaaatggtaattgaagaggaagctaacattgcggctgccgataggaaaaagacttgtgctattattaatccacttattccttctaaaaatggtgcggctaaacaggacaacatcattgttgtaaaggctgccaaaatcacgacacctgatttttttactcgatccagtaaaaaacctgccacaatcccaaaaggaatcccaaacaacccaaataatcctgagtaaaagttagctgttgtttgagaaaggtggtaataatcactaaataaaactggatataatgcaatataggcatataaaacaaaagacatacatccttgcaaaattcctagtatccataccgtcttgttctttatcaccgccttaaacggtgagtcctcccttgcttctattgttgagatatcctctactggagcatccaaaaataagaaatatagaatccacataatcaaggacaagccgccaattaaataccaacttgcaaagtgcccaaatctttcagacaagggtaaaaacaaattcattgagattaacgatgccaaagctggaaaagtcgtaaaaataccaatcgctgttccagaatgagagctatccttaaaccaatagctgattaagaccacagctgtcattacaatcgtcgaaaatgagaccccttcaattattcgagttactaaaagtaaagaaaatgaaccagcgattgtccctaaaaaatttcctacagctaacaatccaatgatcaccaataacaaattctttgcaccaattttagtaacaagtgctccacctggaatcgctataaagatacctgaaatcgtaaaaaccgaggtcaacaaagacatttgtgtcaacgaagtatgaaggtattgagacaaaggagtaatgacaggcgctatcttcaattgtgacattccaatcaatgtccctccggcataaagcaagaaaaatttcatccatttattcacttgtttcctccttccagttatgggtttaaaagcgctttcaaaccttgtgcttattatagcgaaaagcttttcacgttgaatatgataaaaaaaagtttatttcctcttttttttcgtttaaactacaaatagtaatatatttttttgataaaatgattatttcaataaattagtgctgtttttacctaaaaagggggaagcgattgtggatacgattgatgatactgacttaaagattttgaaactcttatcagcagacagccgcatacgtatcaaagatctttcaaaaactgtgatgatgtctgagccaagtgtcaaacgacgaattgaaaaaatggtcgatatcggggttttgcgggattttacaattgacattgattatagtaaattaggtttcagtattcccttctatataaaaattagtgatttaacgatccacttcaatgaattcataaaaagagcacggcagctcaatcctgctttatcgatcgattcagttacgggagaagagaactatatcatgcaaggacgcgctcagaccattgctgaagtggaaaaattattggcagcactgatgtcttatggcaaggtatcaacatcgattattttggaagaaactactggtaaaaaattaattgatcttttataaaaaagttctccctatttatgacataagcgattccgtcatgaatagggggagcttttcgatattctgcaattagcaaaaaaagagacaaaaatagtcattaatacgactctcttgtctctttccgttttctattttatatttttcttgaaattcactgtttttatagcgatcattatactcgtctcatctttaattggaatcaaaacagcatttagtttgcctgttttatcaatctctgcgccgttagcttcaagtttgctgaagagttcattggctacgagctgcggccaaatacgttcactgaaaaaaacactcactttgagaccagtctcccatactgagatccaacctagatttttctttttgaagagtattttacttaaccagttgtgcccatctttatagtagttccagtcctcttgataggattgcttatggagttcttctaaaagctgttggtaaagcttcagatcctctggggaaagatgctttgctaaattttctatagttggaaattctgatgagtcttttaaaatgggtttcatctaaaacgcctcctttttcctcagtttatcaagtaaaacttgtaataagatgtcaagttttatatttttttctgagattttcaatatgccttgccaccttttgacgaaaagccggaggttcaagaatttctaattgatcaccaaaagaaaataagtaattaattgttgtcacatcatctggaagcgtcacaacagcaatcaaacggtcatctttattttgacgaacatccttaaattcctcctgcacgcgatatgctgcagcataatcgaacagcagcgtcaattcaacctgcttttctggtattgttggcttttctgagaagatttttttgggtgtttctcggccgaaggattcagataaaatttcgacatttcgcatgcgggccattttaaataaccgataatctgctctaagatggcaaaaagcataaaggtaccaagccttattacgaaagactagttttaagggttctaatttacgagcggtgaattgtcccttagtgcttagataatttatttggataacatttcttgaaaaaatcgcctgtcgtaattgatcgaataattcatttcgtaatccagtccaatcagagaagtcaatctctaaccaatcaagtgtttcttttttgaaaagagtgctgagttttgaaaccagagaactgcttaatgagccagcggtgagattcaaattctgaagcgcgatcagaatttgctgttgttcttcatcagaaaatacagctttatttaggacataattctcttgaataaagattccgccaccttttcctcggactgcatagactgggatgccggcagcactcaacgcatcaatgtcgcgataaatcgttcgagcggacacttcaaatatttctgccaaatctggtgcggtgacggagcctttttccattaaaataaaaagaatctgtaacaatctgctttcgatcatttgccgccctccccttcacaaactagcatatcatgaggcgttgaacagggaaagtctgtttcttaataaaacagatggagcaaagggagctgtgacaaactccttgtcacagctccctttttccgaataaaaaggtgttccagaatcagcttatttcttaaaaatacccatttctgtcacaacctcctcttcttttttattcttcccaataaaaattgtcgatcaaacgcgttttgccaatgtaaacagcgatgggcactagtattgctgagtcaattgtatcaactttctgcaatgttttttgattgacaatctcaatgtaatcaatttttgctagaggttcagatgcaatttcggcagtcattgcttgaatcaaagcttgagaatttcgtacgcctgctgaaagctgctcttgtgccagtttcaacgcgcgactcaatactaaagctgcttggcgctctgctggattcagatagctgttccgagagcttttggctagaccatccgcttcacgaatgattggacaggcgataatatcaacgggaatattcaaatcacgagtcatttgttggacaacagcaacttgctgcgcatctttttgaccaaagtatacgcgatcgggttgagtgatctgtattaattttaaaacgaccgtcgtaactccacgaaaatgagctggtcgacttgcaccttctaatacttcggtcacaccaaaggattccacgtaggtgttaaatccagccggatacatttcttccacttcaggatgaaagatcaaagcgactcccgccgcgctgcataatgcttgatctgcttgaagcttccgaggatagctggctaaatcttcatttggcgagaattgagtggggttgacaaaaatactgacgatgacatgatcattgtcttgtttggccttttccatcagactgcgatggccttcgtggagtgcacccatggtaggcacaaatccaattgattgtcccgcctgtcgccaggccttcacctgatttctgacttcttcaatcgttttaacggttttcaatgtttaattcctttctccaatgctgcgatgatttccggtgcgatactaaaagtatgctctgcggctgggaattgctcctgctgaatttctgttttatagtgttgaatggcagaattcatttctgcgcctaaatcggcatagcgtttcacaaattttggctgcatctcgccgtacatacctaacatatcctgatagaccaatacttgcccatctgtctgattacccgcaccaattccaattgtaggaattgtcaatttcttggtgatcagtgccgccaagtcagcggggattgcttctaaaacaatggcgaacgcacctgccttttctactgctaaggcatcctgcaagattttttgtgcggcttcaatcgtttttccttgaaccttaaacccgccgaaagcatgaatcgactgcggggttaaaccaatgtgtcccattactggaattgaggcgcgagtgatggcttgaatcgtttcactaaaggcttcaccgccttctagcttgactgcggctgcgtgaccttctttgatcaggcgtccggcattcgctacggcatctgggattgatatatgataagacataaacggcagatccgttactaccaacgcattttgtgcgccgttggctactgcacgagaatggtgaatcatgtcctccatcgttacggacaaggtatcttcataccctagcataaccattcctaatgaatctcccaccaagagagaattgatacctgcttgatccatcaatttagcggtggaataatcataggcggtcagcatactaattttatcaccctgctctttttgcttctgcatcgttaagacggtatttttcactggtttaacttcctttccattggttgatactcgcgctctggatgcttcagagtcgcgatttgaatcaatttcttagtcagctcgcgataaatcccagttgcttctggaggcaaggcggccaagtgatcagtgacagtggaaagatcatttcgttcaactggaccggtcaaagcctcactgggactcatggctagtagattttgtgcattttgtaaaaacaactgccgccaagctgtttgtgcaaattctctggataatccgcaatctaaaagtagttcctctgctgtcgctgtcaggcctacgactagattactgacaaacacacatgccgcgtgataacgaatcttttcctctggggcgatggttgcgattggatttcctaaatttgttaaaagctgttgaacttcggctaacttctttgagccctccaaagtaaaagggacttcagctaattgacttgcaggtatttctttgtcagcaaaagccatcagcggatgtagagaaaaacaagcaatctctttctttgttacaaaaaccgccgaactttttgcaccgctgcaatgaaaaacgcattgtccctcagaaattagcggctctacttcttgccataccacagcgatttgatcatccggtacagtcaagaatagccaatcacttgcttcgatacattctgctaaacgattaaaggcctgactattgatttgactagcactagcagtcgcatgcttaaagctgcgactgtaaaaccctgaaatcgtgtactttttactagcgaagtagcgtgccatagttgttccgacttttccagctccaataaagccaattcgcatctgcatttctccttttttattcaaattaatagaaaaagtatagcacaatcgaaatgaaatttttcttctttacataggattccttttttttgagacgcagaaaaaacacccaaagaaaaaattctttgagtgtttttgcttcaattcccttacttcgccgtcaatgctgattccttatttaaaaagaatggacgatagtacacggctgcattactcattggcaagacttcttcacttaatacgatgccgatttcttctattaaatacttacgtcgttcctgcatccgtgcccacatttctggatattctctttgaatagcagctcgtaattcttcatctgccagtacaacaccgccttcacagctggcgccggaatatccgggaaccgaaggaataatgtcgaattggaggatcatcccgctttgaagtttttcttttgaggctggatagacaggtgatgccaaccattcttcatcggcacaaagatgtcccggattcaaatgccagccatattgagcttttggtaaaacttcttcaattttatcatataatacagcaccctcgaggtctgtggcgattgtctcaagccaggtcttaacggcattgaaataaggttttgcgatacgatccaaataatccttttctccttcaggcaattcgacacttgagtgaacggcatatccgccgcggctttgcaggccgcctttatagccagttgtcatagaaatccgatcacctagctggattttcttagctgtcggataaagattggctttttcaaaacgagccccagttgccatgatggttacaacactaggtctttgtccaaggtcatttaaataggcaccaatatccatctcgctttttccaatttccaactgatccatcgcacttaagatacagtttccagcgttcatagcaccaaattcataatgggcgatttcattggcgttgttggtagtgcgtaagccgttttcgccaatcaataggtaggtcgcattattaaaggccgcggttggtacagcttgtttaagtccctcgactaaaaagtatggaaggtcataaatcacggcattgtcctcttgctgactggtaaagttcttccagccaattagaccaattctatccgcgtgttcaagcttcgtctgctttaaaatctcgggcaccgtcaatttcgtttccataggttggtttggtaatgaaaaatgcggcatgtgaacagcattcgccttgattcgagcaaagggaactttattgaggttctcatttcctaataccaaataggcttctccactttgatgaaccactagtaaagcttcctcaaaacgcggtacaaaaccggtgaaatactcaaaattgccgccatgttctaaatcggcatagatcacaactgcgtcgtaattttcctcttgcatttttttcaaaagctcagccttacgcgtcgccatcgtttcatcagtaagttgtactggttgaatattttcgtccaattttggaggactaattttttctaatttgatcacgattatctgactccttcgttttttttaatcataccataacaattagtttgaaaatactcgcttttttttaagaaaatcggtaaacttataattataaataattttttttgaaaggagtcaatatgaaacagttacttaactcctctacataccgccgaattcaattcgttgaatttttggatcagctaccttcttggtgtgacgtcaaagaggcggcacgcaaaattgattgttcagcgaaaacattattatcagatattgattatatcaatgaattttggggggattacatctatattgaatactcgaaatttcaaggagtgcgcctgaacaatataacctctaataagatggggaatgtctacggattgatatatagtgaatcaaacgaatttcaatttgttgaaaaaatgctgtatgaatcaaatcaggatgcggattattggatcaacgaattgtttatgagtgaggcttccttttatcggatggtcaacgctttagaggattttttgaagcgacgcggacttcagctcgaacgctccccttttcgaattgttggacctgatgaacgctgggttcgcttcttttatcagcaatatttttctgaagcctatggtgccaatcaatggccttttaccttggatcatgaagaaaccacttgttttattatgcgcacctccaccgattttgacgtttctctagatgatcgagagattcaggaggcgacttatttatttatggtgaccttaaatcgaatgcagcaaggcttttatttacctgagaatgtttatgctgaagaagatgatacgattgacaaggttttagatttcagccggccctttgccgaacatttattggcggataaggatttcaccctgcccccaaaatggtacaaagaagtcagtcgaaccgttttccatgaattttacaattgggacaatccagagcaaattgttcggatcaacagtaaaattgatacgtttttaaaaaacgtgtcagagggaatcgattttccattgaatcaagaggataaacggaaaattatgcagcaaatgatgtcctggtatgtagaatataatttctatccttaccgtcaaattatgttgtatgacaaatataaaaaatttgctcgtgaggtccaactagtctatccaatcttctcgacacttgtgaagatacatctacaggatattgaaaaaaaatcacctgaattatggacggatatccggatcaacaatatctttttcttgatgatgaaagaatggtcacagttgccaatccatttagaaaaactgagacgaaaggtaactattcatgtagtgagtgacttgggacggaaacatgcagaaatgctgcgagatttcttagtggctaattatagtaattggaccatcgttgatacatttaatgagccggtcatttcggttggagcagacgattttgaggatttttccacctacgatatcgttttaagcaataatccaattaaaggatatgaaaatgacaatgttttgattgttaacaatttcttctccgcttctgaccgagaaaatcttttgaactttattgttgcccatcaaaaaagcgaagcgcgcaaacatttgaaagctctcggcaatattaaaacgaaaaccgccaaagagctgtatttctctcagcaattgatgaacaaataaaaaaatcgccacctcctattgacgaatctttagagggtgacgatttttttatttgttggcaaagacgattaaattgtaatcatcattaatacacgtctgcaagctgatgcgctctccgccaccagagcttgtgatttgctcccaataatctgttccgtcctccgccattccagaatcatccaccgtaacgatttgagaaacagtgtatgtcgatacattattcgctccatctgagacactgatcgtttccccgacgcctactgagaacagcacattgaaaatgccaggattatgtccaataaaatgtgtattcgcgccatcgtctcctgactgaacagaagcaccgccccaggttgcgactagattgggattggcatcaattatggcttgtccgtttccctgtcccgcattcaaataagttatcaattgcccagcaatctccaattgatccgcctgcattgttgttgattgcggcactgccatgtttggtgcggtggactccggtgctgaactgttattaggctcagcttcattcactgttggtgaggatcgagtatttgtttttgctgtctcagcttctgattctgcagaatgtgcgtctgtgttggacgctccagagttggccgtagctgctggattcacactactgctttgagtagttatctggttgccatcctcatttgattcaattgagtctccactgtctttagttgttgaagacgctgatttagtttcttcctgactggtagactgttctacaatttcttgatcccttgtggcggatgaaccattttctgattcacccaatacagatgctgcgccgtttgttagaaaaagtgcagcgataataataaatttaaaataggtactcatttctgtttcctcctaagcaaaaagctctctgctatttgcttacaaattaacggaaaaacagccctatcactgtaatggtgctcgtgaaataacgaatagtattatttatactccgaaaagatcgtgcggtactccctttttaaatagttgtttcataactttcttttctgaaaacaaaactggtcgagcttattttgcagaatgacctaaaagcttccttcttgatttatgaaaagtcataatgggttatttgatagtcttttatagaagcaaaaagcgctaaacgttcttcttttgtataagtttttaaataatcttttaaaagatttaaaatcgctgtaccccttgatgtataaatgatttgatggaatttctcgaagctattctttttcatttcatataaaattaaagcctttataaaatttttatctagctcttttaaaagtttttcgtaaaattcggacttttctgaagtgaaatctagaagttcttcaaaatctgctggagcagaaatattcttcgaaattagacgtattttttcctgctgatcagctgcagagtaggcttctagcaattgattgaaacgactagatgtcatggtgggagtcaattctagctccttcttcttaggagtaatggtgagaaagaagtcaaatgccttctcaggctcttctaagcgttgactaattcctcttaattgttcaaaaatgcgataataatattcattcaattcaaacaattgattcagttcttgatgatgatttttttcttgaagctgattcagagcatattgtgcttcgaatggatttagcagtaaacggtcattttccttttttccaattaacaatttacctataacctgcctgaagacaatctcaaacagattgttcacatctttgcgataatcaaatcctaacttctcctgatatgtctctaacagttcgtaaatttgattctctggaatatttgcaataaagaatacttccgctgctaaattttgtaggtagcgctcataaaaatcaagaccgacaaagttagccggaacagcttcagcaagttggtaatcaagaaaggcctgatcgacctcagctgctccgtaatcaatatcataatctgtaaaaaaactgccaatttctcgtaagctttcctcaagagaatcaattccaaagctttgataacttataaggattttctcatagagctgttgtaatttctctatgcgttgcttcaattgctgctttccttgttcgaagcgctccggcaaagttccctctccaccattttttagaacaaactcaagggactgttggattctttctgcttgatcaattggcataacgcttgaaccgcttaaccgttcctgcaatttcttcatgaaaaatggataaaaagctggatctaaaagttcgttcctcattcctcttcctccaattccggaaagtcttcaaatgaaccttgaagtgcttctacatctccttgatatttttgatagcggcgttcgatctcttcaagtatttcttgatctgttattgatccagaatggtaggcccgcaaataataaaagagttcctgacaaatagagaaatgctctaagtaatcacttttgtatgaaaatggctcctttgctaagaaatgtgcgaccgtctgagaattctcccaactgaaatcaagtaagtgataattcttaaaatgctgtttgcgttcctcagcgatttccctaaaatccgccaccgataattgaaagcttttgtgattgacttgaagcacttgattgatcgttgttcgcggttcttccttttgctctgataggaattggttaaataacgaaacatcaaaatttgacattcatttgttcacccctttcatagtcctaataacacagactagcaaaaaagacaatcttgaaaaagagtcaaaaatgtggtattataaagacagttaagaagccggaattaagccttccttaactttttttgtttacttttctagctgtactcttcatttcgatttggataaaataactttaaaacaatcacacaaacagaaccagcgaggacaatttagttgccatcactggttctgtttgcttattcaaaatcttagtgttaaaaattgccaaacgactttatttgatctttcgtattcgcttaaacgtaattctttgaatcttgatcggatttaacggcgcatcattatcgtctgtttcttgactagcaatctcgcgtaccacagacatcccctcaataacctgtccaaagactgtgtagcgtccatctagctctggaattcctcccaccgcttcgtagtgagagcgcactttgtgagggagattcatacggtataactggtcgttgtcgatatgatttcgttccacgatatagaactgattcccgttggtattgggtccatgattccccagacaaacggctccgtcaaaatgatacagcccttcatccacctcgtcttcgaaataaccgccataaatcgatgttgcttcgtctccagaaccatctaatgctccgccttggatcacaaaatccttgattacccgagcaaagggtgtcccatcatagaatccttgcttagccagcccacgccaattcttaaccgcttttggcgcatcctgcggaaagactctcatcgtaatggttccttcatcagtttcaatcagacaaagctcttcattagggcgtggagaggtcagctgaagtaaatattgattcggatagttaatgccgtgatcttgctctactactttttgaatataccaatctagtttttcaacaccaagtcgcgctactttgatcagataagtatattcctttttcggtgttgccacacgataagagactaacccgcgtaaattattgctgctgtttccttttactttgtacatactcaaaaaatgtgccgttaaaaaggttaattcttgcttcttcaataaattgaatggttttatcgacttgcctaaaacaaatgaagcaatcttctcctcatttccgtcagctaaaaatcgggtgaaatcccgcaatcgttcattgatttctgcttcatcccaatgccgaggaatcaattgcttagtgacggtttcattaatcaatttctttttaacgataactgcggcagtaccgagaacactagcagctaaaataattttcctttttttcatgtcgtgcctccaacccgttttcttaattgtaccagaaaaggataaagtcagtccttcttccaaaagttatcaatgattaagttctaatcgtattatctaaaaaacagcttaacatactgggatgctaagctgttcataatttataatgattttttgaactttctgattttcttcatcgcccaattataatgactcgatgtggcagaaacgaaataacttcctagtgtactgccaccaacccacggaaagattccctttgaaaacaactctccatttgaaaaatcattggcaagctccatcacttgtttatggctttctattaatagctcaagtgctgtttcatagctggttgtttggtgtttttcccaaaattcaaggttcatttccccataagatttccaattatagccttcctttaagaattgcttactctctcctgcctgattcgctcgcacccattttaacaataattggtgccactcatataggtggatcaatacatcacgaagatttttatcacgttccaaatgcgcctgtttttcattttttgtatcaaaagtaaaagtacggttcaattcttcctttggaattgaatctagtagcataatcattttctcgtacatgtcatttcctacctgaatcaagtcgtgtttagttgttggtcttgccattataacttcctcccatacctctgtccttactatcattatagactagcacgtaacgtgggagtctataagaagttccaaattttttacattcactcactttacaaaactgcgactcgcccgacaagcaaaaaacttcctcagaattacctgaggaagttgtagttttaaataattccctgatcgatttgctttagtttccgataatgagcattggattgttctaattcactcggacttccctgcatcgttaaatgaccatcttcgatgaaaataacttgatccatcgcttcaataccctgcaaatggtgggtgatccaaataactgttttatcctgcagctcattgaaaaaggtattgattaatgcctgctcggttaccggatcgagaccaacagttggttcgtccaataatatgatcggaacttcttgtaataagatgcgcgccaatgctaaacgttggcgttcgccgccagagaaacgtaaacctgcttcatccaccattgtcagtaagccttctggcaaattctccactaattccttcaattctactcgagctaatacttgccaaagagcttcatctgttgctgcctcatttccaatccgcaggttattcgcgattgttgtatggaaaagatacggtgtttgatggataacacctagataattgctgatgtcgtcaccaaatttgtaggtttcttctccatttagcgtaattgtcccttcagtggctcgcagatcgccacgaatcagattcgctaatgtacttttgccggaaccactccgtcccaagattgcgattttttcgccaggtcgcagcgttagatcaattcctgataaaacacttttcttaccttcaggataatgatagtgaacattgtcaattttcaatgtcaaagcgcctgaaatttttggagttgcttcatgacgcttctgaatcgtaggaagatcattcaagtttttgattgaatctttgtagctattcgtttcttgagccgctgctggcaatggcgcaaaggcatcaatcaacggaaaaactgataatacaaaagctgcgatccaatttgccgctcctccatgattcccagggaattgacgactggtccacacgagcagagcgatcgtaatcacgccaaacatcagctgtaaaataaaattacgcttacgttggaagctttgaagtttgcaattgacctctcgtaatgcctcttcggatttttcatgatggttcacataatcctgtccacgttgactaaaaatccaatccgacacgcccaacacattatcagtcagatcactgtataattcattcttcatctgcttctgctgttcttgacgagcaccattgatgatgactgaccatagaggcagtagaaatacgacgatccctaaaaggagcagcatcgctaaagcaaagaagaaagagaaatagccgatcccaataattacaaaaacatagagcagccacgcgataatcgttggaaaaatcgtccttaaatacaaattttgaatatggttgatatcttcagaaagcagtccgagaatgtctccagtgcgatggttctgtttaaagaaaatcgcatcctgctctaacgaatcataaagctttacgcgtaaattcgaggtcatcttcaagacccagttatggctgactagccgttccacatatcgaaagacaggtcgaccgattccaaaagctcgtgttaacacgataggaatataaatcatcagaatattttccggcaacgatgctgcccgactaatcagatagcctgaattgaacatcaaggcccccgcacagaaaaaagtgataaagcctaatgtcaaagctagaatcaaagatttcttatattgcttgaaaaagggcttgacccattcatcggtttttaggacgtcgaataatccgatttgcttcatgtctcttcacctcgcaacgcctgacttaattttgtaaaggcaccctttcttttttgcagctctttcaaggttccctgttcaacgagttttccgtgatccattaccagcagataatccatttcggttagccaatgaagccgatgtgtcgcgaaaaagactaaatgagtttccatcagcggcaacattcgttcctttaattcgacttccgtttcgatatccaaatgcgctgttggttcatcgaacaatactatctttcgttcttgatccaaaaaggcacgagctaacgcgattctctgagcctgtccaccactcagtgtgcgtgctccctcgcctagtttcgtatccaaaccatctggcaggtcattcactaaatccgtcaaaccagtcacttcgattgcctttaaaatctcttcatcgctggcctgcggatgataaaaagcgatattttcccgtactgatcgctggaagatatatggattttgcggaatataaatcaattgctcctgccattgaggctggtcaaaagcggttaacgcttgatcattaaaacgaatctgactagcatcaggacgtaaaaaaccgctcagcaagttgatcaatgttgattttccagagccgctcatgccgataattccgattttttgataaccccgtaccttgaaatcaacttctgcaccaagcttttctgcgtaattgtactgcatcttcacactcaactgactatcagctgaccaggttggtagcttaagctgcgcatcctgcgtctctggcagttctaaaatctgattaacatcgtccatcgcatttttcccatccaaagtcgcgtgataatcactggaaaaatcacgaatgggcagaaaatactcaggagcaagaatcagcaccgtcaatgccggaaataagaaaatcccctcattgattaaacgcagccccaataaaacagctactacggcaacagatagcgtggtaaagaaatctagcgcaaacgtcgaaagaatcgcgatttttagtgtgctcattgtcgctttgcgaaaacgttcactggtcgtaaaaatactcttgctgtattgcttgctgatgccaaagaatttcaacgtatcaattcctcgtaaagaatcgataaagtggttcgatagcacttgaaataccttgtattgcttgtcggccttactttgagccgcgtatcctaagatgatcatgaaaataataatcagcggaaacacaagcagtaataccacaccagattcccaatccaatagaaaaattgctactaatagaatccaagggataatcatcatattcagcatttttggtaaaatcagatgcaaatactcctccacctgatcaatcccatctagtgcagtcgtaaccacgcttccagttccttgtttttgcaccacctgcggacctaagcgaaagatttttcgcaacaattgaccacgtaaatctttagcctgctgataagcatattcttctaatacatgctcccgcaaataggtcatcaaatgacgcaacgcaaaggatatgaaaaacaacagtatccactgtagttgtttgtttaattcttccccgtcccataaatgcgtgattgtcctagacaacccgtacgcttgtccgattataaagattgcttgcaggatagcagatcctgcaagcaacatcagaatttttttgataccgggaagttgtaataacttcttgtcgatcatgattgaactcctatttcctagtaaagttaattcaaataaaactgctaataatttgattgtactccgatctcatgaggatgtttgatccgtttgcggaaaatataatatgtccaggcagtgtagcctagtacaaagggtaaaatagtcagtgaaatataagacatgaccttcagcgtatacggacttgaagaagcatgttcgattaacaagtcatttcctggaatagagctgatcaagactcgcgggaacaagccactgaataataaagcgactagcgcaatcaaggttaacccgctagtgataaacgccagcatctctttatttctaaagacagatacatttgcgataattgtcagcagcacgatcaccgctaataaaatcaatgtcaccgcaaaattattttgaaagaaatccgttttgaaatacatcaaaatcgcaaatgcgactaagccaaaataaagaacgccgtacagcagctgcgcatagttttttgcgcggtagcgaacagggccttccgtacgcagcgcaatatagttcaagccatgcaaataacacaataacgttaaggccacaccgccgacaagagaatacaaattgatgtaatcagtaaaggtcgctgtcatgttgtgattcgcatccaatggcattccttgaatcatactaataaataaaataccaaagaaaaatggcacaagaaagctaccgatagtcaatgtccaattccataattgtttgtgttccttcggcatgtgactgcggaattcaaaggaaacgccgcgtataattaagccaaatagaatgataaacaaaattaaatagtacccactaaacagtgacgcataccaatacggaaatgaggcaaacatcgcaccgccagctgtcaacagccagacttcattgccatcccacaccggtccaattgtttctacgatctggtccttttcgtgttcatcatgggccaaggtttgaaccgacataccgacaccaaaatcaaacccttctaaaaagaaaaagccagaaaacaggacgccgatcaataaaaaccacaataattgtaaactactcatgactgaacgcccccttatcgaaaggatcagttgagtcagtctcctgattcatttgatccagtcctggtcctttgtttaattcacgcttaactaaataaatcattgttactgctaatcctgagaacagcaggaagtaaatgatatttgaaattaataaagaggtcactgaaacatttggcgacacactgtcttcaatcgtaaacaagccgtaaaccgtccacggatagcggcctaactcggtcactagccagccggctgtattggctaaaaatggtgcaaaggtacaaagccccatcacccacagcatccaacgcttctcatataatattggttttttcttacgagtaaagaacaaaccaagaacggctactagcagcatcagcataccaaagcccgccatgatacggaagttccagaacaaaacattcaccggtggataataatttcgatcgccatattttttaactaactctttgttcacagtatccattcctttaatcgagccagaaggtttattataagaaagaatacttagcatatagggaatttgaatcccgaacacctgcttatgttctcgttcattatcccaagcaatcaaggtccaggctgccgggtctccagtatcctcataagttccttccatcgctgcaaacttcattggattcgtttcaatcaaggctttcatttgcgcatctcccgcacctaaaaccatgattgagccaaataatgtaactactaatccgatgcgcatagatttcataaagaattcccgcatttttatgtcttttcgttttaatagttggaatgccgcaagtccagcggcaatcattccgcccattgtgattgccgcagcgattacatgaccgaattcataccagacctttggattagctattaccgcaccaaagtcggtcatttctgctcggccattacgaagcgcataaccaacaggatgctgcatgaaactattggccgctaaaatccaaaaagccgataacattgaggcaatcgttacaagccaaataaatagtacatgcagacctggttttacccgatcccatgtgaaaatccagagccctaagaatgtggactccaaaaagaaagccaataaggcctccactgctaaaggcgcgccaaaaatatccccgacgaaccgtgaataatctgaccagttcattccaaattgaaactcttgaatgatcccagtcacgacgcccaccgcaaaacttagtaggaaaatgtttccccaaaactttgccaattgacgatatttttcatttttcgttttaacatataacgtttccataatggcaacaactaataccattccaattgagaatggtacgaagaaaaagtgaaaaaccgttgtcatggcaaactgaaaacgggccaacgtcactatgtccatttttatttcctcccctatattgtgaataacagaactaaaataaatctaattctataattactataatccttacgaaataaattgccaaatgttcagcttaagcgctttttattcgtaaaatatgaagaaaaaggaaaataactatataaaggtaaaaatttgatggttttcgctcaaaatattgaactgaattgatttatcttaataagaacctcacttgagcaacatttttgtcctttatttttaatgagaaaaattggctaaaaaaattaggagctatgaaaaattttttttgtcataactcctttttccgattaaatgtttttctagtatcggaaatgtgccgaccacttctgttgctgcctcattccttcgcctactcagctccgtaatagacttctaaatgttgaggcaatactttgaagcttaatggcagttctggtccttcatccccgtcgacacttggatgcaagtctacagtttccttcaccgtcaaacgcccctctgtaaatggcgtatacccgatattctcgcttgcctgatcaacacccttgataatatctggaacacttttcagacgatccgtgatgctttgatccttgaggtaaagcagatacagctgcccatcattaaccttcgcttcaggaacaatgtgtgtaaaaccgccaattgttcttgtcaatacgataacaactgcgctgctttcgattgcggttttttctccgtctatttctaacgtaaaatggtaattttcatcattgaagacttctttgaccccattcacaaaataggctagtttgccgaatttggtcttttcttctacatcaacatcactgatggcttcaggaatacttccaacggcaacaatattcataaaatactcatcgttgacttttccaatatctaaagatgttttgcgttcgatggtgaaagtatcaatcgcctctttggggtccattggtattttcaaggaacgtcctaggtcattgactgtacctaatgggaagaaaccaaatttcggacgatactcctgttcagccaatccactgattgcttcattaactgttccatctccgcccatcgcgaaaacactatcgactttttcctcagccgctttgcgggcaaattttgttgcatcgccttctttttctgtttcttgtacatccacctcatcaaaaaactgttccaatttttctcgcgcttgtccagcgtatttctttgcctcttcattccctgaactaggattgacaattaagactgcttttttcattattacacgatctccttttcatctatctggaaaatagttctttttcttttctattcttctttagtataacaggcaaagagcgattatttgttgaggatgctttgcggataggtgatgaaaagctgttggaacgaaaaaaaatcctccattgacgttggaggatttttttcttttagtcattcaaattgtaacgtaatttcatatgttctgatcctgagatgaccatgtcgccaaatagcttcgtttggcgtttcaaggattcatctgccagtttttcattagcagcttccaagaattcttgcacatcggtttgatcagcaattgccttatccgtttcattttgaataccgcgataagccgacattgcttctaactcgaaggtattacggaaatccacgtagaaattgtaatctgtatcacctaagagtgcagttgcacagcttaaccagtacatattatttagatcaaaggtaccggtggcatccttgtagcaagcaggtgtgtcgttaacgtttgaatagaatggtacgaccgtgttaaaggtattggcaccataggctaaccaatgaacacctgcgatttcagcgggtacattgttgcggatttgtagaatatgcacattatggttccggttgattccgattggccggatcaaggtcttttctgcttctgtaccgtctccgtaaggatcgtatttggtattttcaaagtgagagcttaacacgaattttacgtcttcaattgtgatcttgcggtttgctcgacaaatgaatggaagatcttgatccattgggtcttgttctacttcaggagtgaaatatttttgcccataccaagcccgcggattgttatagaccgtatccttgattgaagagctgccgaaaatatgacgcaggttatagccttcaaagtctggattcaaatggttgtcatcgatcaatgcttttaaatcatctgaacaaagcgtatcagcggagtcaaaatcaaaatcatcaatattcatacggtttggcgcaactacgtaagcatcgtctgggatacgaactgctgcccaatgatgtccgccaatggtttctaaccaccatacttcgtcttgatcagaaaaagcaataccgtttggttcgtaggttccgtattctttcaataaagcaccgagacgttctacgccttctttggcactgtggatgtaaggtagaaccaatgtcacgatatcttcttcaccgatcccgccttcaacataaggatcaagtccttgaatccgtggatttgtggtgatcgtttccgttgcggacatcgcaacgttttcgctgttaatcccggccgcaggccaaataccattcgttaaaatcgaattcggcattgaggtatagcgcagtggattatcaggcaattcaactttcacgccgctaatgactgcttgataatgttttggttgatcttctggttgaactaccacaaaacgctgtgggtctaatgcttcatgcccatcatcgttccttgaaataatagttgagccatcaattgatgctttctttccgactagtacggtggtacatgaaccttttactctttttgtcatacttgaaacactctcccttttcataataactcaagtataacgctaaaaaatttaaacaccaaatgaaaccttatcgcaaaatttctgccaatatttctccagttttttcggttccttgtctttctaaagagctgacgatcttagaaccgataacaactccatcgcaaacctgctgaaagtttttgatatgctcgttcgttgagataccaaagccagccaagacggggatcttactgaaggatttgatccttgacagatgcgtcattagatcattgcgaaaatcctgccctgttccagtaatgccattgacggttacggcatagataaatccttccgcatccgctgttaatttttttatccgttctattggactagttaaggaaactaacgttaacaaagcgatgtctctcaaatttggtaggaccagatcacgatgttcataaggtaaatcaggaataatgaacccttggacatcggttccatctaaatcttccacgagttccttaattccataatgaaagaaagaattactatagcccatcaatattagcggggcacctgaacgaatctcctgcaatttttcgaccagcttcttaagcgtcacctgttgtgcaaaggcccgtaatccggcagcttgaatcgtcggaccatcagcgacgggatcagaaaatggtacacctaattcgatcgcggctgctccttgatctaccagcattgctatttcttcttctagcttatctaatccctgcgctcctgccataatatatggaacaaataatttttctgtttctactctgctttttaatgtttccgtcaaaggtttcattgtgctgcctccattcgttctttgatttgctgaacatctttatctccgcggccagaaagattcatcacgataatctgatccttactcattgtcggtgccaattttaatacctgtgccaacgcatgagaactttctagtgctggaatgatcccttctagtcgtgataaataatggaaggcctcaactgcttcctcatcattaatcgctgcgtactctgctcggccgatgtcatgtaagaaagaatgctctggcccaatacctggatagtctaaaccggcagaaatcgagaaggcttctaaaacttgaccatcctcatcttgcagcaggtgcatcttcgacccatgtaaaataccaacactgcctttattgattgatgccgcatgttcttccgtatccaacccatgcccagcggcctccactcccattaatcgaaccgtttgatcttctataaacggataaaacatccccatcgcgttgcttcctccgccaacacaagccaaaactaagtcaggcaatcgaccttcagcttctaaaatttgccgccgcgtttcgatcccgatcacactttgataatcacggacgatttcaggaaatggatgcggacctaaaacagaccccatcacataatgagtatcctccaccgttgcgacccaataacgcaatgcctcattcaccgcatccttcaaggtcttgctgccggaagtgacactttcaactttggctcctagaagctccatgcgaaagacattcagcgcttgacgcttcacgtcgacttcgcccatgaaaatcgtacattccatgccgaacaacgccgcggcggtggctgttgcgacaccatgctgacctgcaccagtctcagcaacaaccttacgtttgcccattttcttggctagcagcacttgacctaaagcattattaatcttgtgtgcccctgtatgattcaaatcttcacgctttaaataaatcctagctccacctaaatctttcgttaagcgctctgcataataaagtggattttcccgtcctacatactgtttcaaataatagttcagttctttttgaaatgctggatctttttttgatgcttcataggtttcctctaattcttgaatcgcgtacatcaatgtctcagggacaaattttccgccatattctccgtagaaacctgctttgttaggttcttgatacatagaatcgctcctttgtttttactttatttttgaagttttatttgactatctgttgccttaaccgcttgacaaaaagcatgaatcttgatgctatccttttctcccatcgtttcaacaccactggaaacatctactaccttcggcgcgaaatactggatcgcttcgctaacattatcgctggtcaatcccccagccaaccagagcttctccttaggtaggtgattttgatcaactagctgccagtcaaacgttcgaccattaccacccatcagcttggcaggtggcgcatccaataaaagatgggcatattgattgaagcaaacgattttctgatctttgacactaaaggcgcgaatgattgggcgtgaaagcttggtcagattcgtcttgccgtgaatttggactaggtctacaccagcgatatctgcgattttttcaatctcgttttgttgcggtgaaacgaaaacgccgactgtttttatcctctctggcagatctctggtcagcctacgcacttcatctggcatcatctgacgcgggcttttcgcaaagacaaatcctagataggttgctccagccaacactgccgcttcaattgtcgggcgatctttcaatccgcaaattttaatttttgtcattttctgctcacctgcaattcagccactttcgcggacggggtcttcgctcgcatcaatgtttctcccactaatatcccatgataggaatgcttaatcttttcaacatcctggtccgttttaaagcctgattcgctgatatagatggacttcccttctggttgggcaagatcaagactggtctgtagggaaacattgaaggtcttcagattacgattgttaacaccgatgatctcagcaccgatcgcttgtgctttccttaattcatccttgtcgtgaacctccaccagaacttcaagtccccgctttctggcttcttgataaagctctgataatcttgctacagagagtgctgcaacaatcagcagtacaatacttgctccggcctgctttgcacgatcaagctgtcgtttatctataatgaagtctttacacaaaacaggaacatccaccacttgggcaaccgcggcaagatcattgatctcacccttaaaaaagactggatcagttaagactgaaatggcactgacaccagctgcttcataacttctggcctgttgcaaaatatcaacgttctcattgatgactccttttgagggagatgctcgtttaatctcgccaattacatgcattttctttggctgctctttgacaatatggtaaaaggaagggcgaaccttggttttaactgtctgaacagctgttaggttctctatctctttttctttttctaataaaattctggttaaaaaatccaactacgccgcctcctgttgctttacgatcagttgctgaagtcgatcataagccgctccagaaagaatcgattgttctgcctcggcgattccgtcagtcaatgtttttacccgaccactagccataaagcctaagcctgcgttcaaaagtacggtttcatagtgagcagaaggaatgccacgtaaaacagaaagtaaaatatctttatttttctcagcggagcccccaacaatccctgctaatggcactcgtttgaagccggcttcttcaggatcaaaagaaaattctttgactgcaccattttgatagacggcgcaatgagttgtgccagctagattggcttcgtccatgccgccatgaccatgaatgacgattgctcgttcccgtcctaattgtcccaatgttttagcagtttcaacgagcgagtcaccagcataggtgcccatcaactgataatctagcggataaggattaatcagcggtcctaacagattgaaaatcgttggtgtcgctaattctttgcgaatatgcattaccgctcccattgccggatgcaacgttggtgcgaacaaaaaggcgatgcctgcttcttttagcaaataatcaattttttcaggactaacggtcaaggtaatccctagagcttctaaaatatcagcactgcccgatttgctggaaacactgcgattaccatgtttcgccataggaatgccgccgcctgctaaaacaaaggcggctgtcgtactaatattgaagctgtgagaatgatcgccaccagtaccgcaattatccatcacaccgactggtgctgctaacattggtgtgccttttccctgcataacctgcgctagtccagtcagttcggctgccgcaacccctttgattttcaagcccaccaataatgcgctgatttggctgtctgttaattgctcctcaaagatcgccttgccgacctgctgcatctcactaatagttaaatcattgccacgatagactttctcaaataattcttgcatttaaatccctgctttctgtaaaaaatgattaagataactagcgccgtcttctgttccaatcgattcaggatggaattgcaagccaaacaccgggtagcgtttatgacgaatcgccatgatacagccttctgcttcatccataacttctagatcctgtggcacctgatgaggatcgatcatcagcgagtgataacgcatgacctgcctttcagattgtctttgcagacgcgactgcttgccatgcatgatcgtcggggcactgatgatttttccgccgaagacttcgccaatcgcttgatgacctaggcaaatacctaaaattggttttctgcgataaaaacgacgaatcagcatttcaatcataccggcttctgcgggcctgcctggtcccggagaaaggacgattgccgaagctttttccgctatggcaaacagctctggatcatcgtttcgcaaaattttgacattctctggcaacagctggaccaaattataggtaaatgaatcatagttatcgacaagcaaaatcattgtcccacctccatcaatgctttggctttttgcaatgtctcaaaatactcgctagtcgggttagaatcatagacaattcctgcgcctgcctgtacatgggcttgattatctttaacgaccattgtgcggattgcgatcgcaaaatcagcctgatcgttttgaccaagaaaaccaactgctcctgcataaatcgaacgtttgactgtttcccattgataaatacgagtcatcgctcggatcttcggcgcaccgctgactgttccagccggtaaagtagcttttaaggcatccatcgctgtgtgtcccggttttagtttggcagtcactactgatacaagatgcatcacaaattgataacgctcaatcgttaagtatgttggtacggttactgatccatgaacggctattttgcctaaatcatttctaccaagatctactagcatacgatgctccgcgatttcttttggatcattttgcagctctttagccaaagcttcgtcgtcttcttgatttgctcccctttttctagttcctgcaatcgggtttgtcgtaaccagctcagcttcgacagtcactaaactttctggtgaactcccaattacttggacatcaggaaaatcaagataatagagatatgctgagggattgttttgcctcagctgacgataatagttaaaaggatcagtcgtaaattccgctgacaagcgctgcgatgggacgacttggaataaatccccttctacaatccgttccttcgcctgtcttacaattgcttcaaactcgatttgagaaagattactcgtaaattccaaagtaggcatttctaaatccggcagcttacttacttgaagaagcttctgctctaattctgtcattcgcctattcatttgtaattctgagtctttgctgtagctatttccaattactaaggtactcatttgtttttgcttgtcatagattacataggattcatataagtaaaattgcagatctggaacacctagttgatcctttggaatctctccgatagcttcgtaacaggcggccacatcatacccgacataccctaaagccccgccttgaaaaatcaagttttcttgctcttcttcatctactaatacgtagttttctaactccttcagcggatcttcgcaaggatagctcacgtgaccgtcttgaaatgctccattttgaaaaatcaaattcttcactggatcaaaagcgatgattgcataatcctgcgtttcagaccttcgttcaaacagtgacgttcctcgatccttcaaactgtaataaatcgtctctggggtcagatgtttgtcgaatatttctttcgtttttctcattctatgactcctttaagttgaatttttaataaggattgctaagtctttcatagctaactaaacaaaaaaaagccctcaaaccaaaataaactttggtttgagggcgcaagcagcgcggtaccacctcttttttactgttcgcaaacagcaactctaatcgtccaacaacgatcgtactctgtaacgggagctcccgtcgttccctactctggttcaagaacgctccaataagtccattcactagggaaaaaatgtttcttctcatcagccgaaactttctgtgattttttctatcctagctacttctcttaaagtcgatttttttgattttctaaaaaagtattcctgtcgtaacccatgttttgttcctttcgaacaaaaaaagccctcaaaccaaataaacttggtttgagggcggtaatccacggtgccacctcaatggtatgccaaacaaggcatttctctatcagtcgtccaacaacgaccttactctatatcgggagttcccggaagctcctactaagatttcaaagcttcgtccaaaagtccattcacataatttatccctactgattcacagcaccatcagctctctgaaaaggctcatttatgttacttctcttttgtatgactcttatttttttgaatattacccgtattttttcgacatgtcaacattttttggtaaaaaaatcaatttatctaaattccaatgactgttcgtaacagaaataaattgctaaaatagagacattggaggcgaagacggtgaataatattcttctgaaaacaataatttggttgcgccattttttattaggatcattttccaatcataaaaacgtttggcaggcgtttcccgatttttttaatgctaggaaagaattgagctttcctgttcccgggttaaaaaaagtccacacgataaattggagaaatgaaaaagaccactgtacagccatgacgcctcaaggattgaccttgactgaagactatttactgatttctgcttactgtcatgatcatcagcacaattctgtcatctatgtcttggaccgtatcactggtgttcgactcaaaacggttattctcccagatttacctcatgctggaggactggcttatgatccaatccatcgaaaaatctggatcagtaatacattagataaccatgctgctgtggcagcaatccatctttccgacattgaaaaatacacaaaagatcccataatgatcgcctatcaacaaaaaatcgccttaaaggagcttccccgcgcgtctaccttgacatatgatcaaggttatctttacgtcgctttattttccttaaatgaacctggaaaattctgctgttatccaattgatgaatacggaaatttagaaatgatggctggggaatccgtggtcaaatctccttatgacacattaatgattccgaaaaaaattcagggactgactatctacaaaaatctcctgctgctctcgcaatcttggggaactcaaccaggaaagatctttgtttttgatattcaggaaacggctgatttttctaatcttgatgaagcactgaaaatcatcgaaacaccgccatatttagagcaaatacacgtcgagaatggacaacttttcgccttattcgaaagcggtgcagcagcctatcgtcaaaaaactccatatgttatgaaagacgtcctgcaagttgacctaatgaagctgctaggaaaaaacatgctctaaattgttttaaatagatccagatagctggctcagaaatactataatgattactcaactttttcagtcagaatgcgaaaaaagtagctgaatcaaaaatcttttagatttttgattcagctacttttcatgattaaacgtcgactcgtatgtcgcgtctgggaaataagccgaaaattcaaaaaatgccgaataggaactattcaacatccgctcccacgtcatgatgattttcagaaatttcttcttattgattgaagtcaaacagtgatgaatcgactttttttattttacagtcccaatgtaaagatgtccgtctagtgcagctggcgcgcccttactgtttacaaattcaaaagaccgaccgctatgctcagtcgcaactgccaaatgacaaagagcgattccaacatctagttccgtcagcttgtacatcatcccaggaagaccattgattttcttttttcgataaacataaatggctccattatttgcgatgaaataccatggttgtccattcagaccagaaggtgctaaccgtgcagcctcaattcttgaatccttcccctctgatatctctttcaaagccttccgatcaaattctttcaaggttctgctggcagattcagccggttcaccaaaagccaatccgataatataatccttgtctgatttcgcaggtttcatcattcccacccaccgggatgcatagccttgagaaaataaaaacagatcgacatgttgaaataaaaaaccggcacaggtatctcgtaatggctgttccttgccataaatcagaagataatggggagcttttggtgttccaatacctttaactccttcaggtcccacaagcttataggtaatttcagcatttggtaaaagtggctggacggtttcgataaaggtctctacctctttgagtgtcgtttcggatagcggcttcatattaaaattgcgcgttgactttcgagtgaacatacttgaatacaaatccatacaataaacctccccaattagattacttattttaactataggtatatcctttaacctatgcaagaaaaaacgtcagggattgctccctaacgttttttagtcaacatattttgaatcggttttattcagccacgcataacctagccccatcactaagccgccaccgatgaagtttccaatcaaggtgaagaataagttatgaacgacatttcctgcggtcatctcagcaatcgtaccatgggaagcgaaatatgctaaagaaaaagctgggaagttagcgataacgtgctcaaagcctaagaaggcaaaaataaagatgataaaaataatcgccattacttttgctgcgtcatccttcatccgtaaactgactagcacagcagtattcacaacgatattagcaaacattccctcaactaaaatttgacttgttgattttgtcagctttgaagcaattccggtgaacatatagttgtctggttccaagtgaccgaatggcgctgtcaatgaaagcaggtatccgcatagcactccgccaatcagattgaataaaatacaagtaaataataacttaatagcaaatgatacagacattttcttcttgtaaacaccaatcgttgtgtacaacatgtttgaagtacctaattctgcattcatgaataaaatcattactaacgaccaactaaacataaacgcataagccattttttccaagcctggaattgcttcctgcatacgaatggcaatataaaaagcaatagctgttcctaacgctaaaaataaacaagcgaacattgaacgtactgcataacgaggcaaactcgaattaaacaaatcaatttttttactaatcgaatactctagctgagacattaaacctgattttgttttcacatgcttttcgctttcagtcacaggtgtttcttcaatttccataaataaatccgatttcataaggttccttccttcttggcaaaagccataatgtacaggtatcatacaagatttccatactattttcaatgaaaacttgcaaaaaaatgaaatattgagaaaaatcgcacaagttatttgattttctcagcaaaaatcgtatgattgaagtaatagattgggagggaaatgaatggttaaacaaattttgaaggcagaagtagaatctttaggcggtctacagctgaaatgctcggctcgcggctttgaattcatcattgatgagccagaaaatgttggcggcaccaatgaagcgatgaatccgctggaggctttgctctgttccttaggcgcttgtaaaatgatggtggttcggttcttttatcaagcaaaacaaatcaatctgaaatcgatgcgtgtggaaatcctaggagagatcgactctgatcgcctaaagggaaaaccaaatgtaaagattggcttctcaaaaattatcacaaattattacattgacgctgacaatactgatgaagaaatcaaagatttagtggcctttattgagacgacctgtcctgttaaagataccatcgtcaatgccccagagatggagctgcatatcaatccatgaaataagctgtgacaaaattcttgtcacagcttatttctcgaagaagttgacgttgccgcaacctccttgtcctttcaacagtccattttcatttcaaactgatcgcaaaaatgatcaaaacccaattcctccatttttttaatccacaattgatccgtaaaattgatattatgcaaacgaacgtcttgatagcgttcgctcaaattgaccattaattctcctaactctgaaattctcccttcgcgtcttccccactgctttacctgcccactatctttttgataaataataaaagcattgcactctttctcattgccagtatacataattcgataatcatctggaaaattctgcagaatctctattcgattttcaaaagaaggcgtatcatgtctaagtggttctagtgattctaacggaaactcagtaataggcagttcttgaaagttttctgtccccttcattgattcttttgcatttcctcgaaaacacgcatattctttaatgatctccaagcccattttacgatacgttgccactgcgggtttattggtttgaatcacttccaaaccataataggcaaagttatactgtttcaataattctaggcaataatccatcatttttgaatacagtcctttgcgacgatgagctggcacaacaccggttgcagcatcgaaggcaaccttttccccattggattcgcccactgcatttagtaagacggccactaactcaccctcaaaaaaagctccacaggataaatcataacgcacattatcactcttaaaacgatgatagagagcctcatcactcaattccatttttacataataatcagaaaatgcttcccgcatacagatagcgattatcgaaaactctacctctgataaatccttgatttcatacatcctactaccccttccttgaccattcgattaatttcagcatatcatgtaaccgttttatgtaaattaaaatgaggagtttcttagcatgacaaaaaagccatctcgcaggatcgagacggctttttctagtaatagaattagatggcttcttcctctgaaatttttgctggactgctaccttttttagaagcaaatgagaggatgatccctaatgcgatcgaactgaaggcagccaccacaactcgaatattctcaggtagcagaaatacgatcgtgtggactggaatccagaaacaaatgccaactttcagccaattgaaggttacaaaagctgtccaatcaattttgccaatcaatcccttcagagtcacgggttcttttgcagctgctgtttcgatccatagctccataatacgatgaaacgtattcatcgctggcgcaaaggtaagattcataatactgcttccgaaaaaagcttgtgccaacgaaacgccagcaaaaggcagcaatttcccagcctgtgctaaaccagcacctcccatgaatactggaaaaaccagcgttaccatacagccaatgatcccccaaacaactgctcgcagaggaacttgagctgaaaactgatagtcaccagaagcaatccgctttccaaagagatcacccatcgtcgccaaaatcgcaaattgaatgaagcctccaatataagggtgggcagagcttgctgctaagatagaatctctagtagcagggataacgaaaagcattaacaaacctgccagcaaaagcccccaaacaatgtcccctcttttcatttgatttcctccaatcatttaggcggctgataatctttatccatcaaaacgactgctttaatgacttctccgctgatagaatctgcttcggcttgattgatgttttcaaaatcatagtatttgataaattgatcaaatggaaactccccgcgcttgtagaactcgattaagtttggcaaatgatattttgcgatagtatcgccaatcaaaacaccgcgaacctttttgtttccaaaaactaagtcaaagaaagtattcacttcaaaatttttctgagtcactgctaacggtacgaaggttcctgaattgcttactgaatgaagggccttcgtcataacagggccaacaccggtcgaatcaatcacataatccaagccgcgaccatctgttaaaaccttgatgaacttttcaggatcatcttctttgctgttaaagatgtgactggcgcctagttcctttgccttttctaaacgttgatcgttaatatcaatcgcgacaatcggataacaaccagcaatttttgcagccataactgcggaaaagccgactgcaccggtaccaaaaacagcaatcccttcacctacttttggctgtaagacacttaaaactgcgccacttccggtaccaagtccacagcccaaaggaccaagcagacgtaaatcaacctccttatccaccttcacaacgtttgattcctcagtcaaactatacgtagagaaagaagattgattgaagaagttattgacctcagtgccatcctccgtgtgcaaaatgaactctccccgcggattttttccaaggttgttgaccgtaaaccacttctcacaagaagacgggtgcccttcgacacaatgcttgcattcaccgcaataagcgtaagacagaatcacatgatctcctggctctacggaggtcaccgcattgccgactttttcaacgatcccggcgccttcatgtcctaaaacatttggaaaattgatactattcccgtttctttcaccgtaatctgaacgacacaatccagaggcgacaattttcaccaatacatcctttgaacctacttctgccaattccagttctgtaatttcgtatggcgcccctttttcctttactaatgccgctttgattttcattcttgctgcccctttcttattaaaaacatattattgaattatttagacgtttggactgacaaattccttcatttcttcttctcctagtacaacccgctctgcgcctttagataaagcgatcatttcgtgttcccctggtactgctacgattggtgcgataaaaccgatccgtttttctaattctgttacgacgatctttgaataagctaccccaccagtcaaagcgatccgatcgactaaaccattggtaactgtggctaagcttcctatgcctttagcgatctggtaaatataggcgtcataaacaatttttagttcttcatctccagccagaatgtgttcttcgatttcttttgcgttgctggttccagcatacgatttcaaaccgccttcacgtttataaagtcgcagcatttcttttaagctatgctcgtagcacagcggcattaaatatttcaacggtaaaccacctgtacgctccgttgagaatggcccctcatcatcagagattaaatcaatcattttccctttgtaatgaatactgattgtgtttccacctcctaaatgagcgacaatcaatgttgaatgctgataatcaagcccttcctcacgtgcaactttcatagccactgctcgcatattcaaggcgtgaccaatacttttgcgttcgatccccttcaagccagagatacgagccacctcttcaaactcgtccactgatacggggtcgtagattagtgcgatggttttttcactgccttgttctttaatctcatgagctaaaattgcccccaaatttgagggatgttcaatttgtgtgacgttcttcaagtaatagatcatgtcgtcatttacttcgtaggcaccggaggaaacaggcggaagacttcctcctcgaccagctacagcgtctaattccttaggatcaattccttcttttttcataaacgccaataaaatatctcggcgaaattccatttgatctacgacattttgaaatttctgcaactcctctgttgaatgcgagattccctgttctttgataatctcaccatccacataataagaaaccttggttgatgttgatccggggttaattgctaaaattttcatctgcttcacctcttgctgcaatacatcgcgactaaaatcgaataggctttttcttcctctgttgaccctcttgataccatcacgattggtacgctggcgcccataattaacccagccatttttgcaccggctaggatcgttaagctcttgccaagaacgttcatggtggtaatatcaggccctactacgatgtccgcatcacctgcgacaggactttcgtagtgtttgattcttgcaacttccttacttaacgaaagatctagcgaaatcgggccgtcgatccaacaactatctggcgcttcgttctgaaactcctgcataatttcctctgcctctacgctagaagtgattttcggattgaccttttccgccgcagctaacaaaccaactttcggtttagcaacaccaattttattcatcacttcgatcccatgctgaatcaaaattttcttctcttctttactgggcgaagtcaccatcccgccatctgttgtcagcagcagcttgtgataagtgggaatctcatttagtgccacatgactcaataacttgctagtagcaattcctttttcacgatcgacgactgccttcaaaaatgtccgtgtctgaagatgccccttcatcagaaaatcgagctcattatttttggccatcttcacaccaatcgctgcacattcttcttccgtttctgctgggacaacttgtgctgaaaaattatgttgcaccaaaatggtttgaatcttgatctcatcgccaattaaaaccggttcgagatactctttgactttttcattaaaaaccgactgaaccgttatttcgtcattggcacagactaccccgatccggattttttgaacgctagtaaagtttgagagtaattcatcaaatttttgcatgaagatcacctaatcccaagggtttccatcatgtttaggcgtgatcggcaccgcgattcgcgaaatattaatcaagtgggtataggtcaaattttcagaaataatattgttcccccatgacccgcagccaagtgacacagttgggttcaggccatttgctggagagcctcctgcatcaatcgttggctgattaacaactaagcgactgactggcaaaacttctcccgcataaagttgatgttctttgctatggctgaataggcctgctgaatgaccggagccttctaataaaagattttcctgggcaaaagccactccttcttcaaagtcatcgtaacttttcaatgcgagtacaggggccattttttccttacagaacaattcttcgctgccaactgcgtcaactttgactgcgatgatctgactatcctctggaatttcaacatcggctgcctcagcgatcacctgcggatcttgcccaatcattgctggattagctttgccatcgatgaataaagtatcacgtaatttcgttaaatccgcttcctcagtgaagaccgccgcttgctttgcacgtaatgcgtcaagaacttcgatttctttttcttgcggataaaataggctttgttgacacgcacagacaatcccgttatcaaaggagcgaccaataactgaaagctccgcggctacttctacatcaaaatcacgatccaaaatcgcttgtacatttcctgggccaacaccgtatgcgggatgtccgctggaataagctgacttcactaagccagggcctcccgttgcaacaatcaaatcaacagatttcatcaattcttgcgacaattcaatgctcggttcttcaattacctgtagcaaatctctaggtgctccaacgctgactaaagcttctcgcatcagctcaatggtttcttttgttgtctttttcgaacggggatgcggcgatacgatcatggcattttttcctttaagggccatcaagccgttacctaaaggggtaattgtcggattggttgttggcgttaccgaaccgatcacgcctcttggatgcgcgatttctactagaccttcttcaggtatttctcggatcacgccaacagaagccttattcttcaaactcgcaaaaatattggtggccataccttggttttttccgattttatgatccagtcgtcccaaccctgtttcttcaattgctaacttggctaatggttctgcttgttcaaaaactgccttagaaattgcataaagcatcttatctacttctgcctgagtgtatccgctgatttcttccattgcgacacgtgcccgttgtaccatttcctccattgccatttccttaagcccctttcatttttacatacatgagtgtatgtttcttacaacctcaatatacctaagttatgaaagcgctgtcaatttcgtgaaaaaaagaacttgttcgcaaaatgctgatgcaaacaagttcttcttttttttaagcgtttttaaaaataatcgaaatactacgtctaatagcctcggcagtgtaattttttgtaacttcatcaggagttcctgaaccatacattccttcgaaataattgtaaagcatactagaaacagccatggcatcattttcctctaatccctcttccactaaaccagctaaaaagaagttatacagtcgcgcgcgtgtttcgcgaaaagtttcaagcagctcggcaaattctggatagacctctaacgtctttaaagattgctgcataaacttgaagcccatctgattttgcgacggaaccatcaatatttccacgactttttcttgaaaactcatctcttcgtctaacatgatcccacgtttttcagtcttgattttctcaatcgtcattaaaacgacttcaccaaaaatttctgatttattcttaaaatgccagtaagcagcacctcgactaacatgtgcatctttggatattttatctaatgaagtattctcaaatccaacttcatagaaattttgaaaggcggtttccagtaatcgctgcttcgttaataaactctcttgcttccgtttcattgtcatctctcctgctttaaaaaaacaaaaattgattcattcagacctatttctaatttttttgaaatcattgataaatttcacgaaatcctctctcttgtgaaatttttctttattagtttaattcgtgagaaaaagaatacgattccattttcacataattcaagcatttttaaaagaaaaaaaccgccaagtttttcacttggcagtctatggtttgaaaaaattatttcattggtgggataaccgccaataagccactgcttaaagtaacatagattgatgaagcggtaggaatagtttccgtttgaatcttcttcgttggcaaagctgtcgcagctaacgcaattaggctttcaccgcggaaaagattaacaaaatgcttcgttgacatcacttgtggaattcgtggactgtttataatactagcaattaattttgattggatctgatcattcacatcaaatttagctttcgctactgtgctttcaggtccaggcgttttttctttggtttctttagcgtgatcaaattctgttaaatcatatgctttgatgattgcatttagtttctctgcatattgtttatctgttgcatagcgtccttgtagatgttctgtcgcgtctttataagattcggtttgatctttccaagttgccttgtagaagtcagcattgcctgaaattccttttttgatcagtttagcataatcttccaatgattctttataagaaggatattttctaaactcagaagtaatttggaagcttgcaccatctttatcctgttccaacgtttggaatgtcacgccttgatccttgaacttgcctttaataccaaacaagttataatttggttcgctggctagtgaactattacctgaaccactttccaaaatcgcttgggcaatcattactgatgaataaatgccgttcttttgtccaatttcgcgagatgtttctccgatttttttgatgaattgatcggttgtttgatttttattaaaaataaatggttgattcgtactatattgtccaaatgcattggataaagagcccgttgctttcggtagaccggcaacatttacgcgaagagcaaaggttggcgcaaaatcagcgatactaccgatttttacgacgtcgccaggttgtggtgcatggatatattgcccattaccaatatagatcgcaacgtgagtcgtcacactcgttggtgctccccaaaatagcagatcaccaggctgtgcttcactgacaggaatttgcgtccccgcgtattgctgatcccctgtccaaccgccgatattatgaccagtcgcattggcatatacaacataagcaagccctgaacagtcaaaagcattcggacctttagctccccaaacataaggctttccaagatggcggtatgcctcttgaacgattgccgtttgaacctcattactgaaggttggtgcattttgatttgatggaatacgaacatccgctgctgctgcctctggttgacgtgctgcttgctgttcttgatttgctgctgatgaatttccagcggaattggtggtacttgacggattgcttgctggtttatccttatttccactgtttgaattccctgtattgccgctcggtttttctgctggttttggcgttggtgttggttttgcttcctccttcacaggagtcacttcaaactggatagatacatctgaatcaggcattgggaattgaccattgatatttccactcgttgaaacaattgcttgtgtggtagtattaataatctttacttcttttagtgtatagccttttaccaatgacacaacgtaatgaacggttgtaccagcaaccaagccttcattcgatgtatattggaagctaatttggttgccgtttgcatcagcgactgtattgtttgcgattggactaccattcgctaataaattatattgtttcgctggttcaggagttggttcggttggagtcggatcaggcgcttcagagctcccggtttctcctgtactcgagctttctgtcgtttgttgacttgatgaagtcgcagctgaattgcttgcaacagtactactttcttcagcgaaagcttgttgtgaagccaatagagttggaccaaaaagactacccagcgctaatagacttacaattttattgtacttcatctctatacctcatttctaatataaatatattttcacatataattaatttccttaattacttactataatatcattaatttaagaacctgtctaaagtctaagccagagttcataaaatcttcaatattatcaacgtgcaggataaaatggctacctttttatctgttcattagtttataaagcttgataaatcagtctaattcgttcacaaattgcatattttactaaatgcaataaatggttattcaatgaagattcaattgcgaataaaatgtttattttaataaaattctaaaaaagtgtgttgtgtaatttgtgtaaataattattttattaatataatatacgcgaaaataaagataaatctcgaaacatcaataaaaatgataatccgagatctattgatgaggttaacttacttaagacaccgtttataattggtatgcgctcagtatctaaacaaatagaattactgacaacacagtgtcaaagctgcagagatcattgaacaagactgcataaaaagaacctaatagcacaggctatttaggtccttcttttcttaaatattggctttttctttatctttgataattttctgcattaacttcgaaattgaacgttcgtggaaatgagtcattcgaacactttcgccgctttcggtccgccaaattttattttcataaaatccaacactatcacgttttccgtccatcagctctttagcataattcaggactagacgaattgcttcacgggtgggttcgtcactttggaagtaacctgggtagctccgcaaatattcatcaagatcactatttcttgaagctttccagtcttcaatgaaatcttccagtgctgtgactacattacttgtttgaatcttccataatgttatgtctacttgattctccatactcatacctcccatttttgaatcctcttacataaacaattataaagtgtttacattttaattagctgagatatttgcaaaaatcttattaaaaaacttcgaaaatagatcgttattaaaagtaaaccgcaaatatttaaggtttacttttaattcttgatgatggatttagtttctttctctcacttttttcggttatactagtaataattgattgataaggatgagtgttatgctaaattttttaataaataaaattacaagtcgttggaagggaaatagaagaaccagtgttgggatcttaggtggaattttaggattactttcgaatctgcttctctttctcgccaagttctttatcggttcactttcaggtagtgtctcgatcatggcggacgcgatgaacaatctctcggatactgcttcttcggttatcacccttgctggtttcaaaattgctggaaaaccagcggatgaagaccatccttatggccatgaacgatttgagtatatcagtggatttgtcatttcgatcttggtcacctatgttgggattcgttttttggatagttcttttatcaaaattctacatcccagcagtgttttgctctcccccatcgtttatattgttttgatattatctatcctaatgaagttttggcagtcctttatgtatcggagattaggtcgtgaaattaactctgatactttaaaggctactgctcaagatagtattaacgatgtttacactacgatcgctgtgctgatctccgcaattatcgaatggttcagcggctggcgcattgatgggtatattggctttctgatcgctttatatattatttattcaggagtcaaaatgattatgagcttcattaatgatttaatgggagttcgaccgcgcgaagaagaagttttagcgatccgcaagcatttggataattacccagacatcatcggctatcatgatctgctgattcatagctatggaccaaatagtgtttttgcgtctgtccatattgaggtcaatcaagattggagtttgcctcatgctcatgaagtgattgatgcgatcgaatatgatgtgaagcagaacttgggggttgatttagtctgtcatcttgatccctacccgattgatgatcctgactttaagcggattgctccagaactaaaaaggattttaaaggatattcatcagcatttgcgttttcacgatctgcgtgttgataagacgaccacaccagagaccatctattttgatttagtagtgcctgaagacttaaaaaaggtcacaaattcacagttgcaagatcagatcagcgaacgctttatcagccaaagcggacctgcaaagctaagtattacctttgatcgaacctatttattgtaagcaagaagagtccgagtcataactattcagtgtcaggaaataagcagaaaatcccgaaaagaaacacagcgacttaggagctgatagtgaatggtacactcaatgcttcgtaaaatttatgaattttcggcttattttccgccgatgctacttatgagtcgctatttaattgtgaaaaggagctgatccgaaagtcttttagacttttagatcagctccttcttttagcttttccgttcaacaagttgatagtagcttcgcgcggttaaacgataaactacaaaatacaagatggcaaagatcactgtcacgataacacaaacaagcagaaacagcttccagtttaccagcccaaacagaaccaacagcttcttaattaaaggaaaggcaaatcctagatggatgacagccacaactaatggaaaagaaaataccatcatcacttgactgcggataaccttttttacttcacgatgactcattcccaccttctgtaaaatttcaaagcgttctcgatcatctattccttcagagatttgcttgtagtagataatcaaggctgttgctaaaataaaggtcgctccgaaaatgattcctaaaaagaagaagccgccagtaaatatcttgttctcagacacaaatgtatatttgtcaacaatcctaacttgagagtcacccagctgttgatttagttgattacgcaatgtttgagcaaaatcaagttgatttttttctccctttaggtcagtgttgaacataaagttatattcaggataattttctgccgcaactgcttttttcggaaaccagtcagacaaacactgctctaaaactgactgattggctaaaacgactacaaaatagtccgttagctcgatctgttgattaattccaggaaatttattgatgcgctttttgattttaaacttctgattctcaagcttcagctgatttccgtcaatatcaccgctaactgggtagaaataaatttcgtcatccttcaaattcactgtttcatctgtgtgctttgcatactcttgagcagtcataaaactaattaaagcgatcgttgctgattttgagttgtaaaaatcctccaatggtgtcagctggtagttgccattttttggttgaaacatgatacttttggtcgaagtcaggtagacctgtttagtaatcggcgcttgtttctcagcactaactgcttcgattgcagctttcaccttctccggctgctgaactgttgaaatcatcacgtcacgtggatagcgtgtattttcaacatccttttgtccaaagaatagactgccagtagtcgctgctgttactagaaccattgttgaaagaatacaaatgctggctaagcccgctgcattttgcttcattcgatgcatcatacttgagattgaaatgaaatgattcgtcttataatagaatcgttcattcctttttagcagcttcagtaaagcaatgcttcctgccataaataagcagtaggttccaagaattaccaaaataatggcaacaaaaaacagcgttaaggcacttatcggagaatcaattgtaaccgcgatcccatagccgcttcctaaaaagaccaaacccaaaatagcgatgatccaacgtgcttttggttcctgttctccctttttgcttccatgcagaagcgaaatagggttggtctttttgatttgccagcaattgattagcagcagcaagaagaaaattccaagaaacagcagggaaacaaatccaagactctcaggtaacagctgaaaaacaaactcatttccgacgctgatcagccgacgcaagactagaaaagctagctttgataagacaactccggtaattaaaccagtgatcagcacaatgaaaaagctgaggaagctttcccaaatcattagctgatacagttcgcgttttcctaagccgagtatattgtaaaggcctagttctttttttcgctgcttgagtaaaaaactattcgtataaaatgaaaagatcacagtaaaaatcataataacgatatgacctaatccaaacatcgaactagcagaatcgccgccaggcagcgcgcgcatcccttcattatttacaattacctgtgtcattgtattgatagcgactagaaatagcattgaaataagaaatggcaaatatccgcgatgattcttctttaaatttgtagaggctaattttagataaaacatatttaagcctccttcgataacaaggctgtcagcgtttcattgattgtttctaaaaactcataattatccttgttcccacgataaagttgatgatagacctgtccatccttgataaagaggacgcgtttggcatggctggccgcaatcgaactgtgagttaccattaaaatcgtctgaccattgaaattcaaacgttggaaaatttgcagcagctgttcagaggttttagaatctaatgcccctgttggttcatccgctaacaataaatctggattggtaatgatcgctctagccactgcaactcgctgcttttgaccgcctgaaagctcataaggatacttttctaataatttttcgatgcctaaggccttaactactggtttaagttctcccatcagttgcttaactggcatgcgagacaaaactaacggcaataaaatgttatctttgactgaaaatgtgtctagtaaattaaaatcttgaaacacaaagcctaaatgatctcggcgaaaagcggccgcatttttttccttgatggtattcagatccatcccgtccaataagatcgttccagaagaaggcttatccaaggttgcgatcaagttcaataaggtgcttttaccagacccggattcgcccataatcgctacgtaatcgcccttgtcaacagacaaatcaatacttcttaatgcttcaacaggcatccccttgaactgggtttgataaatctttttgatattctcaacttttaatagttcattcattgtgaattcctcctagttcattttttgtggtttcgttagccgattgtcactggctagctctctactacatcatagaatcttgcctgtaaaaacactacttacgaaaataaatccaaacttacaattatgaaagtttggatttattcatatgcggcaatctcttctgggaaaactattacgacctctgttccctttttcacttgagattcaatatacaattgacaacctaatttattggcggcctgttgactaaggtagaggcccagtccactagctctttgctgctcgcggccattcattccagtgtatcccttttcgaaaacgcgcggcagatcctccgctcgaatccccataccagtgtctcgaataatcagccgattcttctcaaaggctatgctgatcgtgccattttctgtatatttgattgcgttaaaaatgatctgctctagaataaaaattaaccatttttggtctgagttgacctttccagtcaaattttcaagctgcagacttaaattcttttgagagaaaaaagtcgcatatttctttacaacggttttaatcaccttatcaattgaaatttgctgaaaaacaagatctgtttgatcgagattttgccgcatatagtttaaaatcatctgcaaatattcattaatcttgaagagttcatttttcattgttcgtggctctaactgacctgattgaattaaaagatctaaagcagccactggtgtcttgatttgatgcagccacaagccgaagtcatctagcatatctttttgtctttgctgcagagcttcttgctgctgatttttcgtttctaagactaatcgcaaagcattctgataggtctgctcagacaaggttgcagctttaggcagaaagattaaactattcaattgcagatcttttgttgctaatagccttaattgcttttgcttacggaaatatcgataaaaagaaacaaaagaataggtaatcagcacaaaaaatgtaaataagaagctatcccaaaaaggtatcaagctgagttcatagagataaaacgtcagaaaaatcagtccccaaaatacgaggtacatcccgtaaatcattcgtctttcaaatagaaaatggattagtagtttcattatttttcctcgattaaatagcctttgtttttaaccgtttgaatcaaactgtcaataccaaagtccttcaatttttttcgtaagcgtgtcaaattaactgccagggtattgttatcaataaaatcatcgctttgccacaatgtctcaatgatttgttctctgggtacaatctgccctcgtgtggcaaatagaacacttaaaatacgtgattcatttggagtcaatggcagatgatcatttgttgattgaatctgattgattgctggaacaaattgatactccccaaaggaatagcttagttgctgaccatatttataactgcggcgcagcagcgcttgaatcttcgctagtaaaatcgtcagttcgaaaggcttttcgataaattcatcagcgcccatattcaaagccataacctgattcatgtggtctttggctgaggacagaaaaataatcggcacctctgaaaccttacgtatttcctggcaccaataaaagccattaaaatatggcaaagaaatatccaaaattactaggtcaggctgaatcgcttgatactcttcgaaaacatgttgaaagtcatttgctatttcacaatccagcccccactgagttaaatgctgttgaatcacagaaacaatcgtcgcgtcgtcttctacaagaaaaattttattcgtcattatagttccttctactttttctttttattatactagaaatttgtagaatttctgagtttatcttgatttcgagaaatattttatttacctatactccgtaaaataaaaatttagagactaaatgccaacaaaaaaccgtagacctcatctaaaaaagatggtgtctacggataaattgcatgcttagaacgcacgataaacatattgattttttggagcactcaccatttgagcattgttgactgtcacagatgggatctgacgatcaaaaggttcgaagaaatctaaagttatagtcccttctacatgcagccattgattgtttttcactgttaaatcagttggcagcttggtcatcaatccaaatactccggaatcagccacgcaatgaataatcccgaatcggaaaagaaaatcgtatttctgattgttcttgttcgcctcgtaaacaaagccgttaaaagaaatcgtttttccaacaaaggaatttgggtaattgtagattaattccatcacttctaaataattctcatccgtgatctccaatttttgatcggtctcgtatttcttcatcagctgtgtcatttgttcattatagtcgcttttattgtaatagatactcgtatcaggcttcaaatattgggtgttcatctcagggtcgcccaccgattctttgcttactggaaagctgaagcccttcgcttcaacaatcgtcgtatccaagctgatcgttggaaatagcgtccccactactagcggcaaagccagcagcaaataagcaattcctcgctgataggatttgttcaagccgtgatcatgcccgtgatgatgatgctcatcatttttctcattctctccagcggcccaaattttcaattggaccaaagcgagtatcagcgacaatgccatcgtcagaaagatgagataacgatagtggacattaatatattgatctagtctgccggaaacctgcaaatacatcattaattcaaaatagcccgacaaaatcaaaaaacgtatcattccctcttcctccttctatatcactagcgcgtaaatcgttacaaccacactgatcaatgcgatcagctgtaggataaatttcccatgaaaactgcgtttcatcatcattaaattcttaatatcaaccattggaccaaagactaggaaggcaacaatcgcattcgtaccgaataagcttagtaaagaagagcccacaaaagcatccgcttctgaacaaagtgacatggtaaaggctaagaccaacatcactagaatgccgacgatttttgaagaggtcagctgcagcatgaattgtgtcggaagaaagacctgcattccgctggcaatcaaggctccaatgattagatatcgtccagtatcgaaaaattcatcaattccgtgaataagcactgaccaaatgttgttttttaagttttttctaattttattttcgacgtgatgatcagaatgctcgcataattcggattttaagattggagaacgattaaaataggcgatccatgagcctatgatcaaggcgacaatgaagcttccaagagctcgcagaaacgcaaacttcatactgttgccaaaagcaatataggttgaaaatagaacgatcggattaataatcggtgcggttaccataaaggcaaatgccgtatgctcaggaactccctttcgcataaactgtgtgacgatcggcacgatgccgcattcacaggatggaaaaaagaagcctaaaaaagaacctactagaattgctagaaacttattgttaggcagaattttttgcactcgttcaggggttaaatatacctgcagcgctccggaaatgagacatcccaatagaacaaaaggaatcgcttcaatgacgattgacaaaaaaattgtgctcatttgcagaaccgaatgtggtagaaaattaaacatgtgacgcctccaaatttttcgctgttctaagatatactctttttcggcaaaagacacaagattttttcaattcacaaacttttttttacgctttttttatagattttttacttttgagtattaaaaaagcccactcaaaagagcgggcatgtacaaactattttacagcatcttttattatggctgttttatcgcttgttcaaactggtcaaaaaacgcttgaaatcaacgtttaacaacgattaaattacgataaaaaacgagctagaacgaactagttaggattttttgccccttttctgcccctttcattcttaatcttttgttcgctcgaaaatacgaacgtacattcgtataataagtttatcaatttagaatagagtgatcgcatgcagtcaataacaggaacagttatcaaaattaaaattttaaagatgtcggaatgtccccttgtcttctttaagttagatgatgttagttgcttgattgctggtcactctttgaattttctagctgacgtagaagatggcatgaatgttgtagtggctggcgattataataagagaaaacaattcattgtaaaaaagtacgctgtgatcggaaaaacaaaaattatgatggaatttgatatggtaaaagcctgatttttcgggctttttaatttaccaacataaaacaacaaaaaaaaggagctcccgattagtccagggctccaaggattatgaaaaagtgttttagggttgttggtgactaaagtatacagcgagcggttacatttgacaagatagatttactcaaaaaaatagaacgcccggtcgttcgagcgttctgaagtaatgaaaaaaatgtttttaggatatgaatagtatacaatgaaacggtttcatgtgcaatgggaaaataacttatcgtgggctagaaatcttttctcttttattgatgttgatcaactatttgttgagacttgttagctgtatcttttacatcttgtttagccttgtttaatttatcaatataagcttttaaattagaattttctttgtttgcacttgctaattgttgtttagtagaatccagttctgcttgcaaagaatttttttcactgtttaaagtgttaatctggttatttagtgaattaatggtattttgtaaatcattagctttattttgtgcatcctgcaatttagtattaaattcttggtttttctgattgatctcttggtttttctgctcaatttcctttaatttatctgcgatttcttgctgtttagattgaagttctccatttttactatttaattgagattctaaactagttttttctccagctaattgatttttttcatttttcaaagcttctaactgttgcttgtaactatcaatatctttttgaaattgagttaattggccctctgtacttgctgatttattggataattgtatgattttctgttctttatctgataatgaatcattcaacttatctaagttatcattgatggtagaaatattctgttccccaccccagtttaaaatactgtctgcataatttttaccggctaaaccaataaaagctattacaatgatgagtgttacgactacatattttttccttttcattattcaattttctcctttcatatataaaagcgacattgcaacttttatatattaacgttttatctattgtttctcaataacattgtttatttataaataaattttaatataagcctgcatactataattaaatcgtgtttaaaaatcaggaactgatattgtaagaagatattcagttgtcggcaagacaagtatcatgctaaaatttgaatcaagtagattccaacggaagaaggtatgaaatgaaggctggcgaattattgagacaactaactgcgaatccttttcatgaggaatacaaaggaaatatatacacaaatgggcagtacccttattccactgactactgctaagcctgatgacgaaggaaacctaatattttttcgccagaacagaaaggctccaatgagcactaaaaccttattctctattttgcttcttcataagaataagcagatattctgctggaataatcgaaagatcgcaatatatagctaccgtgttaatcgcgggaaaatcatagtgtaaaaaagaagctcccagaggagctccgttgtttaagggtgtaaaaataggctctataatatctagtgttggtgacgccttctgttgccaatactttttcttttttctaataaacgcaaacagacaccttgaaatcctttagaataaagtcgacgaaaaccattcaaaggagtgtttcaagatgtcctattcagagtttaccaaagagttactagatattctagacctaaatcttatctttcatgaagatgcctttcgcaaagagcgaatcaatgacgaaacatgttttgtttttgatggcacattgacctatcaaccagaggaatgcttccattgtcactatcaaaataagcaaacgatcattaaatggggctggaaaaaagtatccatcttattgaatgatgtcagtaactacaagaccattctgcggattaacaaacagcgcttcaaatgtaaacactgtggaaagacttttttagcagaagattcagttagtgatcgtcgctgctccatcgcccgcagagtcaaacaagccattcttgagctattaagtgagcctatttctatgtctttgattgcacgtatgaagcacatttctccgaccactgtcattcgaatacttcgcagccttcggcctaaaattgtttctttgaaccagccgttaccagaagtggtgtgtttcgatgaattcaaatcggtgaaaaacgtctcgggagccatgagctttgtcatgatggacggcaagacccatcaactgattgatattgtggaaaatcggcaactcaatcctttacgcgactatttcttgcgctaccctagaaaagtccgtgaacaagtgcgtctagtggtttcagatttctatacaccttatcgcacattggtgaaagagtgttttccgaatgcccgaatcgtcgccgatcgctttcatattagccaacacattggtcgggcttttaccaaccaccgaattcaagtaatgaagacctttaaaaaaggggatcgtcggtcgaagcacttaaagaaatactggagactacttcaaaagaatgcgtgggaattgaaaggtcagcatcgctactggcgtccgtcatttcgagatcatctgacagaagcagagatagtcgatcggctattatcttatgatgattccttaaagcgaggctacgaagtctaccaggattttctttccgttatcagaagacaagatgttcctgaattcgtcgcgctcctaaaagaagactacaaggagttgccaaagcactaccaaccagtgttcacgaccttcaagaaataccaaacagaaatcaaacgagcgttgcgcgttccctattccaacggcctatagaatgtctgaataaccatatcaaagtactaaaacgaattgcctatggctttagaaactttcaaaactaccgagaacgaatctttttatatcgaggaaaatattttaagaaaactaagaatactacccaactgactaaagccagaacaacaacacggctagacaagatagctgtctagccgtgtgagtatctcgattattctattgaatttcttcaccaacactcattgacgaagagcctaaaaatattgaggaaatgattcatcagcttttacaattaattagttaatagtacattttattgaacctctcaagactgaagtcacaagtattctcggctttttaataaaaatacccaaataattaattagcatattttatttgttgttttttcattatcggatatctaattaattcctcaccatttaaatcttctttattcatatctatggctgtgatttgactatcttcatacgtacgataataataaattcctttatctacattacaacaagaagaataaatagtatattcgtattttccgtcaccaacatcacataaacctttttgttgttctactgaacctaagatatggaaaaactggctaatactttctgattctgaatctcctgataatgagtttagtttagtaaatgtcgctttaacaaaacgagaaacagaagataaatctccaggcaaacctattcctcccatcccacgactataagcgttcaaactaatttgatctgaaaaattattattaggtgtttcactcgacaatacacgataattgtttaaattaaataattgataatcaaatgaagggttatttgtaaggactcctacaggattatcatatatatgaagcccatctttcatactttctatcacaatagacttttctttatcagctaatagccagtgtaaaggagatagtggaagttcttcactataattgatgtttgctaaattgatattcattaataaatctttagcttcatctactgttgcacattgtcctaaaatccaaggaataaattcaaaaggagatacattatcttttccttcttgtatttctttataatcagcatacccagaaaaatttaatccagccatactcaaacccttttcattggtaccatcataataaagaggatagtcacttatacctgcggcaataccaatcattgcataatgcttatccaaattatttacctttcgaaaaactaatttataatttcttggagtaacagtgactacttcattgtaagatatttcataatcaaaattccttccaaaataatgatcatttgtaacataagtgatggacgtacacataagttattccccctaaataatagttcatttaaccccatattactcctaataatttcgtatatcaaaagaaaagcacatcgcatacaaaaaaacgttttcgttttttataaattgacaatattatgtaccccataggactcgaacctacgaccggacggttatgagccgtctgctctaaccaactgagctaaaggtacaaggaattatttgtgcaaacgcatacaaagcgttagaatataaactagggattcctgaacttccccacagtctcttaaattactatcaatgatactgtatcaggaatccctatttagatagtattcgtatactagttttagagcaactatttagcttcaaaaatgaaaagactgaccgagaagctagtatcggtcagtcattacggtatatcgaggtgctaccttcgatgctataaaactatcatacacactccatcggagtcaatattttttaatacttaaatcctttaatatggctcgggtcaatcttcacgtcatttgctttacccatctcctgaatttctttcaagacgattggtgcgtcgtgatcgttaaatccttcacctttgacgcgtacatcgtaagttccgtagctattagcttctgcgtacgtttgtctatccaacaatacatctttcaggaagttgcgcatatgcccttctatttttttgctttgttcatcattaagattcctagcttcaattttaatgataggtttatctccatcaacaatcgcaatattttgctgcatataagttggatagtatgactttagttcttgtttcaagcgatttacagcgttctcgtatttccacttagaatcacacgagattattaaagtataaaccttgttcggctgaaacactcgttttacttgatcgcgcaataaagtccatgcatatcgtgtttgaatgcgttgcaccattttaaccgcttgatctttcgacacgttgtcaatcgcgataccgtttttatttccagttgcaggtgttgttgtcgctgtattcgacgatgttgagctagatgctccagtttttaaacggtacgcataaaaataaggacatccggccatcacccatcgttgatcgtgattagcaatgatcgtagtcattttccaaccagtgcattcaatccagttttgattatctagtgctacgcctgtatgaccgcctgcccctgcagagtaaccctttttcccccaaataattacatcgccgcgttgcattggaaagtctgtattttctgcgatcttttcataccctagctttagaagatagtcatgtagcgtttcagtgctaggaatatatccatagttaaaaccaccagattcacgtaaaatacgataaacagagcctgaacagtcgcatgtaccatctgtgtaataacgagaaccatacatgctgtagtagcaattatttacaaatttttgaacgacagctaatcctttttcgatattaatagccattattttttctcctctcttccttctttgacgttttcgatttcttttggttgaggttgcagaccaacatttttatcatctgatttttcgtaaagttccttcgcttttttcatgtccatgttactcattccctcctaaattcaataattttgaaaacatttgatgcaagcctgtagaagctaaaccactcactgcgccataaacaattgactccacatctataccgttcataacaccgcccaaaatcgctcctaacgctgctacaatcaatgggatataagcatttgctactttattaaatagcggcgtaaccttgattacatacccaactattaaacaggcaactacaataactggtacaaaattttctgtaataaatgataaatccataactatttttcctcctttagtttattcggcaaatccaacacttttttatacagtgtttcgccagttccgttaccgccaagttctcgatatccacgccacaagtactctaaattttctagatcatctatagaaatccaaccctgctccaaaaattcggagcattgcttataaattttgtcatgcagaatggctacattcgcatattccaaacgtttgatccttatttcccttgaccgctttataaatactgtggaaaatctttaagaatccccctaatccaattgccatcaagaaactgttaatttccagaaatttttctaacacatgctttccgccttcctttcaataaataattgaaaaagcacactcgaaagtgtgctaaatcgttgcttatttatctatgctaatttgataactgtaatagtttttgtgccaacactcgtgaaactgccggtaatattggtttcaatacctgcagaaaactcatctcctgcattcgctgtgtttacacactgccctgtgccgtcccatctattcttgagtgcatctaccccttgaccagtcactcgatcattgttgccggcacgagagccattctttaacaaattgaaatacaggtaaccatttgtttgtgtgcctatttgataccacgtgtgaatgataaataaatacgtaccagctttttggattttaatccgaccattggacgctctctctgccactgggtcatctggccgcatgtgtagcacttgagttcctgatttgacctctttcccatgaattccactaccagttatttgtccttgctccccattgaaaacactcatgttaaatgcaccaaaaccacctgatacatttaaatcatctaactttttatcaagcgtcttaggactaacaattttatcccttgcttcccctgcgtttacttcttcctgcgtcgctatacgcttatctacatgctgctttacacccattggcgtaataaatttatttcctgcaagcccctgttccgcatcagtctgattggcagtagcgtagttgtcgacgttaccgaggttaacttgagccttcgttacggaatgcggattcgttttatcagcaacatgactattgaactccgttttactggcttgctccacatttgatacgtttcctagtccaacttggcttttggtaactccatgaggattggttttatttgatgtatgggaggtaagatcagttttaggcgcttgttcaacattggtcacgtttcctaagccaacttgggcttttgttaccttgtgcggattagtcgtatctttatcatgttcatccaatccgtcctctaaatgattgattctttcagcagtaactactgctcccgcctgaatattttgttcctctgttttattgtcatcataaggaatccaagtttgtttttcataagccatttactcaccttcttttgtaacgttttgtttattaatcgaaacctgatcaagagctacttttagtgaagcattttccaactctacttgagacagtctttttaataattgatcaataacgctttccgcatttacttcaaaaccatccttattcatttaattcaccttctcgtaatttaatatttgattagagtttttctctgtcatgtcagtaatacttattggatattgaagcaaatttggcgctttatcgttattgctggatagagtttccaaataaaattcttcgtatccttttctataagctactatttgccaactaaattctatgttaggtttgtcagacttaaccatgaaacgatcacgctctaaatggcacgcatgaacatttgcattctcatatggtgtaacaaaaacatgatagtttcttgaatcagtattgattgtttctaaaaatattggttcaatttcaatctctataaacccattttcatcagtaattgccttaccatatgtcgcaaataaatattctggtgtttcataagcatatagcaaacgctcaccaaaattttcagtccttacaatggagctttttgtcccatacacataaaatgatttatcaactgaagcatcgctcatgattcttgccgatgttcctctcaattggattgagttgtttgtcataaagctcattatgccttcagtatttattgaaaaaccagtattcgttaagttcagatatttgttacctccaatatctgctctgaacgaattgttacgtaaatacaaatttctatatgtcccattgtcgttcgtactataagaaaaaccagttcgttcaacactaaaacttaaagtattcccagttgatgaataaagacttaatctatctaaatcaaggtttaattgcatattgctggttgaaccatatgcagtgataaaattcctattcagtttattgcttttcaaattgaaggttccgccgtcttcaactgcaaaatacatgacaccttcattttgatttctgatcgcactatatatttcgaatactttttttccatcagactttctgttccaccgaattgctccgttatctaaggtcatattataatccgtaccagttgacgtgattttagatcctgttatagtcgcccctttaatcgttatagcattcaacgttccagtggatatagatgaagcgtcaagattgacgactcttattttagaagcatctagagtaccaacactaattgttccagcatcaactgatccaatcattgccgatgtgattatagctttgtcaatcttcgtctcgttagttagccataattttgcgcctttaattttcagccactctttaccatccatctcatcactcagattaatggttttaactatttcatctttaggagtcgagttttcaatttgctctttgatactttcctctaaagcggtggatgtcgtcattacccactcgaatactccaggtgccgtttgcttataaacccatatctcatcatctggtccattctttttaaaccagatgtcgccttcttttggatttgtcggttcctctgttccttcataaacattgttcttgccagctgcatcgattctataatcgatgtcatcaagcttttgttgcaacggtcctttgaatgatgagacgttagctgaataagctttagtgtcagcactaatagttgaactgaaaccaccgtcgaaagacatcgtataatttagaacaggagatttaaatttatttccctctctatctgtcatagttacccagtctccaacctctaaagctggattccctcgccacttcaaactgattgggtaaaaattgatgtatcttattttctggaaaacatcatctaataaaatctgagtcatcgcattattttccagagaaatctgcgcaccatttgttgaccctgattgaagaataactgtttcattactagattcattagtttggttaacaactttacatgtaatccctctaggttgataaagtaattcactttttacaaggccttttaaaaagtattcatttggttcaatcttaaagttcgggtctgctagttttcgaattgacagtctaccttctctatcaaaacaaacaaacccaccttcaaattgtccgactaaacctattgcttgccgatatgtgtatccctcaaacttatttatcgtgtaattactcaaatggttaaacgaaacaggatcgataatacttccacttttgtttgctatttctaaagcaatgtctgctaattttgttggatatttcaactcggactcatatttgtcttccaaaaaaataaatccgtctctagcttcaacagttgtagtcttttcattcctgtcgggatcaactcgaccactaatgtaaaacgttcctagaggaacaaattcatatctatcgggaacatagctcaccaatcttgctcttccaacttttgctcgatcaacttttgaaacatgattgatatttgatggcaagccggttcctcttattttaaatcctacttctaccttgatctcgtctagttcttttaacccttcaataatttcagaaaaaacaattttaactgtggctgattgcgttgacccaatctggaaactttctcctcccaaggcccccattgaataatcaattttctttattttatctttaagatatatgactttatcattaacaatgatgcgtgcaaaagcttccctttctttatctttacaggcttcaaagaattcatttgaaactatcagcattcagtattcacctacttttcaattaacgatacggacaagccttgccacatcatcttcgagaatttttcattccaagagtaaacaggtactactctatcaccacagtaaaatgtttttgtaatcaatcctgcctcctgtgggtcaaaataccttactgtaaaaaaggcagaatcaattaaacgcaaaattaaagagacctctgaaatttccaaaggtccccattttacatctaatttagtttttcttccgagaatatcgcgaaccatatctccattagcatttcttccgctagaaccactgtctaaggtttgtatgctgacagataattcttttggtgttactacatttgaccctgatatcaagaaatccattagctcatctccttataagtttagttctacatttcctatctgttcatgatactgattaatgcctcgtacagttacttgtcctaatctagttgaatctacctctagaacaacttccaagggcccgtcgttccccttcagatccaaattagagagcgcgttaataatggcattcgcgattgtattaccaagacttgaaagtagattatctgataagttttccatcccattaccagtaatagaaaaacctttattctttttaccagatgaacttgaaccagtataactatcagatgaatctctaaatacttctggcattgttaaatcagggataccatcataccccatgaaatcaagcgcttcgttgattctttgaaaggctagttctggcttagttactggaacaacccattcagtgttattgccttcagacattttgtaccagccaaactgatctactctacctccgttagcaaatccctttttcttactttcgttttctcgatcgagtctgaatagttcagaaatacgatcactcacgacacgaaaagcacttgatttaattctcttagccgcgcctagagccatcgaagctcctggttcaggtatacctgctacatcaacgaatttttcgaatgctcgatctaataaagcactcggacttatcgaaccaaagaaattcttaacactgtcgattaatccacctttatagtgaggaatattattcataaagttattggtgtccctaccatttaggacttgggtacctttgggaaggttaaccatgtaatccttttgtttagggaacatgccaatctgaccgcttggcaacttatacatctcacgccaattgctgccatctccgtcatttaccatagctaatccgcctggatgaaaactcgtcccagttgcataactgaaatatggtacgtgccaagaagataatcgccaacctgcacctaaactactcataacccagttaactccagagataatgccattaacaccttttcctattccagaggctaatccattggcaatattgttcatggcttgtttaatcgtattaagaccgctagacaggccttttgcaatatcaccaggtaaatcggacgcccatccccctactttcttaaagacttctgaagctgtagtttttattgaatttaaatgtcctccgactccatccttcaaacttgaaaatgcagaaacagctttacttttagctgtctctgcaccagacctaaccgcttcagctgcgctgttcattttcgaaccagcagttgaacgtatttcttcaaatttagttgaagtggaattctttaaatcagaccatttgctagaaacccaatcttttgcttgacctgctttatcgcgaactgtatttgcagtattcgtaaatttatctttagcggcggtataaatttcacctgctttactagtcacagcatctttcgctgcattccgtttttccgaagtccaatttttgacattattccaagcattagatgttgccgtctttataccttcccatttttcaccgatccagtctttcaactggctagctttctctttgatggtatcccaattttgccaaagagctacgcctactgctatggctgcagcagctgcaacggttaatggtccacctaaaaaggcaattaatccgccaatcgcagttcctactgctgaaagaactcccgataaaccaccaatagcactcaatccagcgaaaagtcctccaactatttctattacagttgaaagagcactaattaccttcagagcggcaacaaatgttccgaaaaccgttacaaaagctgaaaacccttcttgatgttcagttatccaattcccaatacccgaaagagcgtcacctagttttttcaatacatcaacgattactcctccagtccattcagcaattggtttgagcatggaattccaaaagaaatcaaaagcaggtttacatccattgattatcccgttaagtgcatctagtgcaccacttaatgctttaagaaatgctggaattaaatcttgaattgtgtatttggctaaaggaagtagaacgttattataaaaccattccaacccatctccaatgttttttgtcaatggttgtattgatttaagtaacccattaatagaattaaggagtggacggaagtcaagagtcttagcccactctgcagtcgctcctgtcattcgtttgattgtcccaaggactgtgtcaattatcttcataatcccttcgaagattgtttgacctcggttattttcatcccatgcctctcgaaagctttttgccagatttccaacagtattgaaaatattcgtaatgatctccatgatattagctagaatactttcgccaattcccgaagcaaaagccttgtcaaatgctgtcatgattgaattgattagcttaagaacttctgataacgcgttaaagatagcttgaatgatcgccgtccctcgaccgttgtcgttccaagcattttgaaatactttacctatagtttctattaaatgaaatagcttagtatagaattctatcaattgtcttgcaagctctaccccagtgccattattccaaacttctcggaatgactccgcgatatcatgcaagacttctaaccactgatttaaggcattaaatatttgctgaatcaatttagtgcctcggccgttttcttcccaagcaattctaaaagcccttgcaatatcaccaatgatataaagaacatcgcccaataatactaaaagattttctacaaacttttgtccggttccattagtccatacctccaagaatgatttaccaattgccttaatcaattttccaatttcagataatgaatacttgaacgcatccataacacgttttccctgagcgtcccaagctttctttattggatcaaagagttttgacatgatgtctttaaatttcttggcaaaatccgttaaccatttcggagtttctggaactgctgctgatccaaagtcagcccatggatcagaaccagatccattcggattcttcggtcttgttggaatttcctgaggaatgaactcatttgattcgtcgtcagagtcatcactgaaatccaaaatgtttaattcatcaaacccagctaaaagacgtttatattcttttgctttttttcgagctgcttccgttctatcatgctgatctttaagttgcttatttgaatccttaatggattgagccatctcatcgtatccatctgatgcatcagatgcagcacttccagtatcatctaaagcttggacattgttcattagtccctgagcaccgttgaatgcatcaccgatgttcattccgaaaagtgtggatataaatccagcaatatagccagtaactttagctaaggccgacatcaaagcatttatcgctggcaaagctgcttggtaaattggataaaatgcagttagtaaattgaccttaatttgatttaaactagctgaaaactgtgcgttagtctgtaacgctttaaaaagcccgccagctagagtcatgattccttggtataagaacgtgaacaagaataactgcgaccatagcatcttcatggagcgtccaaaaccacccatgccttgagccattctagatgttccgctagtgacttgtttcgattgtctgtcaaataaacttccaaatctaccaatagaattactcatcatatttttgaaacgtgaaaagagtccttctgattgtttcgtggaacccgacagattcctcattccatttgctgccatacgagcttttacaggttgctcgccaagttccgtatttacactagacaacgctgtctttagaacgccagaacgatcttccaactgagcatatgaacgttgcaaagcatcattgtctgcaatcaatttctccatttttgctgattgtttagaaatagtttcagcggttttggtcgattgtggtgtatcttgaatccctgtagatttccactttccagatgcgaaacttcctgtttctgtttgctgcatcttcatttcatttttcagagccttaactttagctctcatagcttcaatctgccgctcattgccttccatcttagctgaaatgttagacagagaattagggatagcatcatattcggattttaatccgcgcacaatcgcttgtgcttgttgttgcgacttgttcatctgaatttgagcttttgaaatttgttcgcctattctcgattcacttttagtatccccagacaaccgcgcaccatttttattagcctgcaagttggcaattcgttgttgtcctgctttggcttgctgcatttgcgtgttcactttatcaactgcggtttgaacatcttttgtcattttaacagcgcctttggatactccagcagaaagtgacttcccaacttcttcgccattttttgacgccgattgattcattctcttcagcatagaatcaaaatttgaattcattttctcgaattgtttggtaaatttatcgaacccttttgaatcagataattttttttctacagcttccatcccttgaccagatgaactcttgactcggctcatcatagaatccatcttttgttcaaatcgtgcgaccttttcctcaatggggttcaagtcaccatcaaaaacgacttcaagtctatccagctccatgatctatccctccttttcctgtttatttttccgctctcgtgtagctttaatcaattccgttcgttcaatcatccgagccttcataatttcccaatcttgcggccgatttgattgttcctgcttatcttccgttttcaagaatggatagtgttgatctggtttaggcattttcttcggatcattaaaaccataagcatttaattgtgcagctttgtaatccatcatggctttttcttctagctgttgttttctaatcgcaacatttgcttcagcttgtatgactatttcttcataggtcattgaccagtatttttctgcgggtattcctgcttctactgcttttggatacatctcctgcagcaaatcagaaaaggaagagaagcctacactagactctcttcctcgtttttctcttccccaactaggtcttcttcgtccgtcttttccgactcgaaaaaacctgccttctccatcaattcttgaatgacttcgaaaagcttcatcatcgatccgcctttagaaatatattcatcataaagtttcgtcatatcggcagacttgatgtttgctgtttggttcgcagaatgcaagatagttagcatttcacctaatcgcggcattttcattccaccgttgccagtcatcataattccaaataacgatttacctaatttcttctcaatgtctaccgttgcacttccatctaatacaagggatagagttttagttccaaattctactttcattggtttcatattgtttttcctcctaagatttaaatagggccagagggttatctctagcccatatagttttcgttaaacgtttatgcccaatccggtccatctgaaacagttacagacagcgtaaattgataggctccgtttacttcaccagaacccattttcacagtcacgccgccagtaaatgtgcatttcgcaccgtcaggataagacaattcaaattttgcttcttttcctgacgtttgcactgcctttaactttgtaaatacagctttgtcatataagaaagtgaactctaatgaatccatatcttgaatacccgaaatatattttttatttgcgtcttttagcgtcgtaacatcaacttgttctggatctccaccgatttcaggaacagcttgtaatccttcaatttcagtaaagccagactcggagcctgatttcattgataacgccgtgcccttagttagtaaaccggcaaataattgtaagttcatcggtaaaatttttgttttcttcatggtatttcctccttgttattggtatacaaaaagcgttcgattatctaccactcctcggaatgttagaatcgaacgcttcaatgcatcttgattgccatcatcactggctgtattcttaaatccaatctctttcaatactttaattatttcactctgtattgtagatagagatttgtttccgtataaatcgatttttactgtccattcagttagtgcttctttgtcggatatatctttcttgtgcggctttgcctttgtcgaataaattgcagcgggcatattcgaccatgtgttaggatactccgcagatacgagcttcagctcagcgacttttttcaactgagcaacaatatcagactttatgttataacgctctgtcatagtttcctcagtccttccttcacacgatctttataaatgtcttcggccatttcaaccacttctttcattgacggatatagccaaggtcttgccggctgcccacgagtcataaagaaatcttgtcccttgatagtcactcttgaaataccgtataccatctcaaggtcaacagatgttttgtgtacaggaataaaccaccgttcagtagaataaacaggattaactccaggcggcagatcttttggtgactctgctccgactggacctgtaccaaactctcgaaacaatgcttccatcttgtctgaccacacacgccctattattttacctttaccatcgatcacgacttcctgctttggagaaccacttaattcacctgatccatacttaattgacgattgcaggtgacttgttgctcttgccacagtttcatctacaatatcgaatgtcgcttcaaaaacagcgtcttccatcactttaggaatcgctcgtatttttgacatcagtcggtcagcacctctgaactcaacgcccatcttcatcacctagtttcttcaaggtcacattacaatgagcagaaaatgtttgaatggcaacaatttcatagtctggttctttatctttgctcacataaagacaaataccatctttctcattctttccttctttgattttgtcaccttgatacttgcaagatttgatgtatggaagactttgaccatagacagaagccattacttgtcctcctgcggattgaatattcatttgaatctctgttgattcatctgaaaaaccttcttgaaagtttccttcatcatcttgcccagttaaccgctcttttaaataaacggttgaaaggtcacgtttccttaggcgcatgaaaactcacgacctttcccagcctgtgattatttaagcccgattttaatttaggcggaatatctgtaataaaggtatgggagacgccgccttcagaacgagcagcatctccctcatttccttcctgattccaagcaatcacaactaattgtcgcgcatagtaataaaggctatcgttcatctgttcggttgttcgagcggtataatcaagaatgagagtaatcgcgtcctctaacatgcctttaattttaggtctttccttttcctcaacatcgtcgagacgttccatcaacacatccgtgtgtttttccagtaactcatcattcattttcctttaccttctttacttacctgttccagttctaccagaagccgtgacattaggaacataaagcttatgtttgaattgaacaatacgaatattttttggctcatatacacgttcccaattacttgccgttgccaattcggcattcgtaggagaagaacctgcgacagatttattagtaaatttcacccctcttggatgtaacaagaagtgttggcgattaatcaaaatatcatctcctgctaaagcatcacgatcagtttccgttggcacaggagccgcgccgtttcctaaaccgattgctccttctccgaaaatataagaagtgaacacatctccatctaacggcataccatcatcaacaatgacacgtttccccatataagttggaattttagtattgtcagaagctaacaagaattcaattaagttttgttttcgtaaattagcgtatactgaagaatgaacagctaatgctgttaatttttcttctgcatctcccagtttgtaagaagcattgataaatgtttcccctgtaaatgctgcatcatttccagtttcagcggaaatatctagactatttccagccattttagttgatgttcctccgaacacacctttcaatatagaaagcaaagttacttgttgacgacgcgcccaataagcggcaactaaatcaccaattgctcgcataggatcatcaccagaaagtgcttttgctaaatcgttcgctttccaagctttaccacgcatcaatagaaccgcctgatcttgattcgcggtgattttatccgtttctaatggattcgtatcagataagacttcgtcttcaccagttaaatcagcccaaaaaggcatgttgattagtttaccaccggcactagctagagcatctagctccggattatggcttacaatacccgattggtataaagctgataattcagctgtacgctcgattacatacttattaaaaacttctggaacaataacatcttcaatttttgtttttttagcgaaaaactgtaaattcatttttaatttatccacgattttatccttctttcttatttattggcttgagccattagcacttttgcccgctctggatcttctttcaaaatctgaccttgttttgtaaggttgagtgtttcctttttccaagggttaacttctggatttgttgcatcccccaaaggattatcaacactattttttagttcttctttcactttcttttgtaaggatttttcccaagttcccacagctttttcccacgttgttttcaatttgttatatgcagtttgacatttatctgcatctgacaaatctaaaagatcaactaattcaacaggtaaattatcctctgttaactgcgtaattgactgcgctcgtaattcacgcatatttagttccaattctcgctgatctaatgccgcttcacgctgttggcgatcataatccgctttttgttcagcattcatttgcgccattttttcagcttctgttttcgcatcttgccgaaccttttccaatttctcatcaagtttcgattgccattttttgtcattattttccaaagccgtattgactgctttagaaactgcagcatcaaactcaggatttccagcttcatatggattcctgatttgttcggaattctgatctgagggttgttcttcagcaaaaagttgcaggtctaatttcattagtaaatttttcaattcaatctctcctatcccaatcagtcctagcgcacgcaaaaaaagcagcccagtttaaccagtccacttgatttttgattgatagacccaatcagtatgtttgatattttcgaacagtttaacgccatattcagggcagttaattatttttttctgtaattccgaagcttctttttctgaagctcaatttcttttttagaatatcgttgttttaacttattcatccaatcatcatatgtttctctttgttccatggtaattgtttttccgctgatcggatcatgggctattcgtttgcctgttagtgatcgtttgccaataatagcaacagcaacagttcgacaccaaggatgaaacggtggatacgttccggcttccccattaacaacagcttcggaaacaagataaatctttccgtctttcttctggcaaatttcagatgttcttaaatctaatacagcaatcaaacgatactcttttacacctctgtctcgccatgctttgagctttgcttgatttgccatataattggcctcggttcgtattaaacgctgaacaacaccaattgagcggtcaaattcagtcgctatcgctttagccatttcaaactcggacatccctgtcatagactcaacagtaaataactcttcaagacgtttggccaatgcttcagtatctttccagatacgttttgaataatttgaaccatgccaatgagaatcaagaatattcttggtgtacttagttgaaagctccttgaattcgtaatcagtcgatcgaatatcaggatcattccacacctcaatcggtacgtcacgtttttgcgtctgtttagatgcttctatttttgaaccatgcttttttccattccgaacactgatgatctgatcagattttgtttgctcaacttgccttatgattgtttcggcagttgtctcattatacgaatcgtgaataacatcaatataaaattcagtcgatttatctagttgcacagaagcaatctgtttggaaactaaaaaagacttggctttcaagtcttcagctcgtgttattcgctctttaaatgccaatccattcaatcgttttcttgcggactcttgaagttcaggatgagaaacatcatcagcaagctttctcaattctactaactcatcaggttgaacagtttgattaagtaacgctcttgtttctccctcatccattccagaacgttgtttcgctcgactaaatagttttctaacttgcctcgtcaaataactttgagcctgtcgataagctacaattatcttttgttcgacttgtttcgcagcgtcattaatttttttctcttgcttaatccctcgatcgagccagtaggaatcatcttgttttttcggcaactaacttccccctatcaaagtttttctgtagcagtcccggtggacaaatcatcaaaacccgactacgagaaactgaaacagactctgcaaacttgattgcttcatctctagaatgaaaagtttttgaatacccatggacagcatacttcatgtttgctgtccattttttagatacttcaacagaaacataattaggatagttttgttgaatatcatacaaaccgcataataaagcttcgactaacgcattatcaatctcatccggattaagaatggaaactttcttgtcttgcaacttcacgtacgatttacaaagtaattgattagtaatcgtgataaaaagagtagacacaccagcgcaaacgatatctttgcccggttcagcgtagtgagcatgaccagtaacctcataactaatatacgagccgttactctttatgaacgttgctttgatcatcgtcttcctcctcaggtggttcatctaaatccgaatgactgtcttctgcttgaacgcccatcactttcttctgtagctcaattttttcttccttttctagattcaattgttcaattacttcatcgacatcatcaatatcgggcaaccacgacaataaaatttttagtggcaaaatccctgcgttataagcagtcacaatctgattgattatgtcgctcgtgttaattgggagattaggttttaacttaattttcactcctgaaatatctatctctggctctgtgtacctcaacactgttgaaaatatttctaagcgttgccttaatcccttaatcatgtatcgagacttcacagacattaattgcaacaaaccaaacaatttatatttcattgcctcacccgaaacgtttcccgcgaacttctcatcattcatatttggaacatacgttactttatgaatgtcatctaggattgcatcacgcaacaaagtcacacttgattcatctaatgcttttgttagatagcttgcagctgtatcagattttgaacctggagcttggagcattttttctttctgaagcttttcaccatcaccgtcttggagaacaaacccctgaataaaaagaatcgcatcaacgaacgcttctttgtcgttcagtcgatccgattgtaataagttatatgcgtcaattaatgagattgcttgctcaaagtccccctgcttttcttcattgtttctgtactcaattacaggaactcttccaaaatagtgtggtaaagctttaactaactgataggagccaaatcctctcgattcagttctatacgtaagtatccgatcatcactgtaatacttaacaatataatggctaatgccaccttgcaaagtgaatactggttgatagtgaatcgcaaatagcggatttttgtcgatagtgtcatcagtaactaaaaaaatccctcgtggatcaatacattttatagataattctgcctcatctttcaaataaattaattcataacctattccaaaggtcgataaatctttttctaattccgtgtcatgtgaaacaatatcaatacgatcatactcgtcaagaataggcgacaaatcaacttctccagttcctgaataagcaacaggattgccaaccataaaaccaacattcatatcaactacatacttcgcatgattgataagaactttattattcggagccgattcgttctctttttttctaagcaagatatcgtgctttccatcataataatttgaaagtctttctaaccgctctaattgtttctgatgttcttgcaagcagtaatttaatagttctgcagaaggatttttcaaatctcctgctatttctctatttactacaatcgccatttaactttatccctcctttatagtccgattttcgctctattgccgattactgctgtattatttctcatatcttcactaaaagcatatcgagttgcatcaatcgtatggttgtctttatcttcaagtcttggctttggattcccatccttatccacttggtaatctatattttcaaattctcttgcaatatttggtgttctcagcgggtcaatacagataaaatctaagtcgtctaaccattcttccccgtattcgactgaatcaggtcctttttttactcctctaattctccgaatctcatgctcactttgaagttcagcaattgatttaggctcagcggaatcagcaaatatttcatccgattgataccctcttgcttttgcttgatttgagaactctcgattgctcatttttacaccatagatttcatctatagcgtaaatcccatttttctttttgtcataatgccaacgaacgaatgctagcggatctgttgcataaccaaaatcgagaccattcctgatgttgtcaaagttcgctaccatctcatccgtaatacttcctggttctacttgaagattatcgaacggaacaacacctgaaccgatggctttgcctaaatactcccaatcataacgcctcgaattacgttcttttgttgcttccgcctcttctataaaggctttggctataaagggattgtctttatatgttgtatggtggacatacgtattttttggctgaaaactagtctcgtattttttatttacccaactttgttttctcttcggagggttgtagctgtaaaagaacttataaaaaagaccatctgcaagctctccacgtaaaagggagtttgtaatggtcgttacatcttcttctgttttaaactctgctaattcttctatccaagctattgcgaatggaaatctgctatctttcaaagattttatccgttctggattctgtgcaccccgaaaggtaatatagttccctctgggcagataggtaattctcattggacttttattgatcttgaaatagctcgttaccccttgttcttcgattgcccacttcaactgttcaaaaactgataattcaatcgtgttatcgatgaatctaatagcaaccgcgttgactggatacctcatgattaattgtatgattacatgcgcaatatcagaagatttacctgaaccacgaccgcctttttcaacaatatgaagaatttctggatcaattgctgctctccacgtactatgaaaagcttttggcaaatactcagatagtttaaccatctggctcaccactgatgtcatccttaaatacaggaggctcaattgaagtaatctccttcttatcaacaggagcgaatcctccacgatcaagaatatctttagctgcgttaaaacgaaccatttctgatctggctgctaaaagcttcaacattgtattcaacgctttacctgatgacttacccataatagtttttacatattcatcataagcatgagtgaaatcttcgtcttttaaccaattgtaaagtgtctgttcgcttatctttagttcttcagcgatttcaatccgctttaaagagccttcgaacagcaattctatagccttattatgcctattagtaagtttcataaaatcacctccaaactaaaacaaactaaacgtattttctgatgttttcttgtatatgagcatctttccaacggccgcaccaacaatagactagcttgcaatgatcaacctctactggcgttgcctctctgatcatttctacaatcgaatacttcgccttcatttgaacagacatcactacacgtttatgctgtcctttcattggcagcgggtatttattgtttaatgacacgtaccagtaagttttcattgctctatccctttctgcgttgcaatgtaagcgttattattgtatgctttatgtataaattgtttacgtttcacagatagatcgctgcggaaacagcggtctatttttgtgtgttgaaatacatggccaaggatgatatatttatagttacttgttacactaaagggctgctgcggaaacagtggctcttttttgtattgctatgtaaacgctatgatgttatacttgtctaacaaccctttaacatctttttcatttaattcctgaccactattacccggtagtggtctatttttgtgagcaaaataaaacagcctcacgaggagactgctagattctgtacgttccttctgggtcggcaatcatttcaactgcacgatctaatttcattcccctaactttattgttcaatgattctttagcctcaacgatttcttcaactgagacatcttttcttcgagtcaagtttttcaaatatgctgtttcacccttgataatagcttcttgtagcattctcattcctcctcaaaataaaaagaccgccgaagcgatctcaattgattttctattttcccatgctataatagacatagaaaaaggacgtgctggtaacacgccccatgtagaaccgttaaaaagacggtggcttaaatgaatagttttttttgttaaaccatctatcctcgccaaagtgttagatggttattttttgttcttgtgatctgtaatcagcaacactaacgtcgcaaatgcgatcatcagtgacaatgcttgataaacagacatgcctactcccttctagggataaagctatgaaccataggcatcacccctttattcaagagattagccaccatcttttcacttttctacgcaaatattatacaaaaagactaataatcatgctagtatgttttaatttaacagcaaaaaagaacgtgctgtatgcacgccctgtagagttgttaagatgagtaagatctttttttaaatcgtttaaaaaatcattctcaaggtatatcattttttttaacttgcgcagagtcataaaaatggagctactcatcttaacttctctacgttaaatattatacaaaagaacatattcgaaatctataaattttaataaaaattatttgataacaatagacagcacagcgaactttcaacggaaatgaaacttttcaactccattcattatttattttttgtgccgtctagtatttatcgtcttgcaaacgatcgaaaaaattgaaacgaagaggagcttcctcctttcaaaattttctatgctaataaaatatcatgcctatttcaatacttccatacacaaaatgagtgcacatttagtgaatgttgaaattttcaaaaaagggaaagttgctgagtttttctccttttttcatcgtagtattcaagctcttctttttttgcttttctatctaaatggcgagcctcgtaatcatcaataaattgaagcttacttctgatttccgcatgcttttttcttatgtaagaatcgctatatccggtttcttccactatttcttccaaagttaatccctcaatgtacttcatacgaacaatttcattttcgactcctttgaaagattgaataatgaccaacatttccttttgttgttcttctaacaattcaatctcattttcaatttgagtaatattctcctcgagcaatgacgatcgagagtttttttctatacgtactttcgataaatcaccagttgtccaccgaatcaattcaagtttacttttattcagattccactttaagtagagtaactgttcttccaaatcttgataatcctttaaccattgaaatctcacaatcgccactccttatggtataattatcttgtcagtttttattcataaagaggcgttgggaactttcccagcgtttttttgtacgatcttgaaacggaaaaatgaatttgataaacttttagtgtgagctggtttctaatttttccatattacccgaatttttctagttcacaagccgctgtttttttactcagcggtctttttttcttacttatctccgtgtaaaataagactagggctagtaattttcttgaagtttgagaccgacaattttgacactgcactagcccaatgagttaggttaaataaaaatacaacccacttattataagcacaacgacctaactcagggaccgctgatataactgttcagtggtctttttctatggtatcatctaaatgagctagttctttcctttctaattttcgttaacgtcaaaacctatttcatctagctcgtagaccgcttttttagtggtctatttttgtgataaaactattttgtctaacgaaaaccaggcattatacctttcaaattcataaaacctaggcttcttaatttatttttttgttatttcactttgattcacataggtgtacaatatatttgagctagaaaaatccataaataatccaagaatactacactagcttagggactgccatatgaaaaagcggtcctttttatgatacaattatgaagagctgatattttcttttgttgactacaaacaactttcgcaatcggctcattgaccgctaactgactgcctagcggtctttttttattgcgctactaggtgtacaatagtgatgagctggcccctcctttttaatcgggttaaaagcatatttcaatcagctcatggccgctgaccaatccccagcggtctttttttgttacaaattattttgtctagcggaaactagacgagagttcttttccaaggcagccagtggtcggctgtctttttttatttttgttttaggtgtaaaatacctttgaactattctaatcagctacccatagttcattgactgccgtttcataccgcggcagtcttttttactatggcttcagttaccgaatcttagtaaacagaagttttctcaaagtccggcattggaccaaacttcttttcaaacgaacctttggcttttcttgattcttcacgtactaagtctattccgctatactcaatctttttcgctgctaaacctgcattctccttcatcaatacgagcattttttcttttgtatcacacatgatcatatcaagtatcgaaattggtaatgataatatccttgatcccgagttgagatcactaaaaactatctcgataggatcaatcggcaccatgacgacggaacaatctataccagctatttttgctttgaagccaactgctcgattccatccgttttcacatgcaagccacacgtaatactcctgtggatcaatcactacttcactcattctcacacctacactttctcaactgtgccacattcaatcaatgtaacaatcgcattcgctttatcttcgctatcaaatctcattacttcgccgcttaaaccgtagacgagatgaggctgtaattcatcgaaaaagtcaacaaagtacgctgacccattgtcttctatcttaaccacccacttcggctcttcctcgacctcgtctggaatatgaagttcagtaaaatgtctcttatactttggaaaatcgtcatctagtggtgtgccgcaatatggtggttcttcgactgggaaatcccaccagagaacaggaccaatgtcttcgtgccatttttcggccaaatgagcaatcactttcgtcggttcgtctagttgattaacaattccgataatgtcatcggaggcatcattgtatccttccttataatccgatctgtccagtgacgtccacggttttgaaaaatcatatttttcttgctttattttctctataacttctcgtatttccatttcatacctcttttcttacttgataggctgaattagcgtattatttacgttttattttcattattttattcataaggttatactattatttatcataaggaggtgataagcatggtaagaaaaattggatttagttgggaatattttttaattggattactttttgttatagcttctttagtatcatttaataatccagatagtagtttaaaagcagttgtctacgtttttgccattgctgcagttttaaagggaatttttgaactgttttttagacgtaaacttcatgaattcactaatcaaaaatcaaccctactaatgattctcggtatatttgacctgctaattggtgtatttttactcttcaatactaatgcaggtttactagccctaccttatatttttgctatttggtttattgtagattcaattatggggcttgtaggagcagatatttacaaggtcaatggatcaagttactattggtttattctgatagtaaatattattgggataattgtaggaattatgctcttatttaatccaattgtttcagcatttacattagcattcttagttggtttttatttaatgatgattggaatttctcttatcgcatatgcgttttaaaatagaggcttctgcctctatttttatatgataggcgtggttaccggaactattattcttctggcaacccgtttagatattcctctttttcatatcgttctaaaacacgtttgtataatgcaatcaattgaagaaattcagttctattcatcactggtgtaatatctttgactcttttaatagcctctctcacctctggaattgagacttgatctttcattcgccgtcctccttgtatgctctcttactattccatagaaacgatgacatgtttagctcaataaaattaccaatactccacttcccgccgaacaacagaaaactaatgggtagtaaaccccatataatatttaagaagtattgaatcccttctaagcagaactatccaatcttcaagtcctcagactttacaaacatcccgttgatcattttcccgtctcgtccttgtatctcaccatatgcgtgcatcaaacactcgtacaggctcatatcgctttgcaaagctagattgagtaatgttatcaccgaatcgcctatagcatctcccaatgcgtctttatcgtctctgacaacagcagcggaaacctcgccgatttcctcgtagacttttagcatctgtttttgaggatctgctttattgattccgcgttctttcgaccactcttcgatcatttgtattagttcgtccatcatgttctcctaactcttttcgtacgtattttcggattcaaattgtatttcctccgacaaaatgcgatcactttaaaatccatttttaattcgtctcggatttctttgcttaacttcttttcaagcaacatctttacgacagcagcctctaaacctgggcgtttatctaaatagcgttgatacttttcatcgtcgctcattacaaccggttcacgatattcgataattcccagcaattcgtcccgacgttttactttttctggatcattgaaccactctggatttagttcctcgtcagttagcataaaaagttcacgtctagcctgtcgttgttctggtgttttcttacgcctcatgcggtcaccgccttacgttgcaatctttgtagcatctcttttgcacgtttgcgccattcggaatactctagcttttgcaacgcactgtattcgtatcgcccgttataaaccgctagccaataaatctccatgtatcgacaaaaacattcgttcgattctttggtgtctagtttcgtttgctccatggtcttttcaaagcgttctagtgttcccctcaacttttctcgatagtcatcgggtaacaacgaagtgattgcgtctgctaattctaaatcagtcattctatcgctcctccaggctgtgaatgtattgttctaaagcttgtcggtcacgttcattcaatcgtttttttctgacatattcatcgaacgccatattgggcgaaaagcggagttcctgctcgtaatacgtgtacagtgtttttccgtagtttgtagcttgttttttcgacgatctgctgttgttgacgctggtttgcgttttgtaatcacgatttgcttgcgcagccatcgtatcgtatttatcacgcaatttttttgcggacaaaataaccgctgaccagaacggatcacttgttgcccaatctatcatgttgcttacttggctttcggtccgcttgtcgatctcgatcattttccgaatatcgtcggcccaacgatttaaattcggctctttgatttcctgattctgacaaatctgtttggataacttttctgcaagaatgaaatatattgagtcagggtcatacacgcgctttttgcgtgttgacgacgatgttttattgttctcattgttactcattgttttaacattgttgtttgtgcttttctgcggcttttcagtgtcatttgagtggcttttttcttgttcctgattttggtaaatgtcataattgacaatggttagaactgtctttttactgtcactttttctaaccaacattttgtctttctccagcagggttagaaaatcagtcactttcgtcctggaccagccccatctttctgacaattgtcggatcgacgtcactttttgaccgcgttcaacttcaaccaattttccatcaaatacaaatttattgtcttggtgattggcatccattagcagatcaagccaagcttcatattttgaaaatactcttttttcttggtatacccaatgatcacggatatttcgatgaagagctatccagcctttatcagacattcgcttcaccgccttcgaatttgaattgctcatctaattccttaatttgttttccattcatgatcccgattctgattaattcttcattatttagatacactggatggatttcaaatcgagtcatgaattcggtaagtcctaatgtatgaatcatcatatggtgccttctgcataatgctgtcaacggcaacttccgatgatcaacttgactcctttttctatttcctacagctatcaaatggtgtatatctgcatgtgattgcccacaaatcacgcatttacgatgcttacaacagagatagaagtaatactgttcctttcgtggcaacaattcgtaagactttggaaatggcacattccactcaaacataaaatcaataaccatttctaagaggttgtttacttcgcttacggtggcatcagaacagtcggcaatgctaatctcggtgaaatatttcattgcataggattccttgaaatagctgtctaattgacctgtaccagtaccagaccatctataaatatcacctagcaacgcccaatagagcttacgctgttgcacagtaaatcctctaggatcgggaataaacactccaccgttcacgttgtttaaatcaccagagaatagtttgattaaccgctctatatccagtgattcaaacaattgaacagtcattacccgatttgtttcatcgtagttaagcattttaaatggataattcatttaatccctcttaaaatgggagatcgtctgcagctatatcaatgctattaaaaccaccatttgcaaaacttcttgtatctctaactggatcaaccccagggagtgagtcttggaacgtgttattatgggcaatcatatttgcagcttgatcaatctcatcttgtctatgtgcgttcatttgttgctcagacggacgttcaacaccgtttggcttgcttccttctggatcagttggtttatatgacttaacttccaaattccattttttgttatagtcactttgcttccactcaacagttatatttagctttctgttttttactgcttcaactaattgttcaatactttgaattggtgtaccatccggaactccaatcgcggctaataacgtgttaaatcgtttagcagataattcgacatcttttttatcccatactatgttgttgtataagattttcccaccagcatatttaccgtctacaacttcataatttaaaacggccatgtcattaaatgtattgttagttaacttatgttctgaatcttcgagaattctaacgttgtagcttcctgcttcactgactgatttaccaaatacatttttagaatctgttataaatagcgtcattttttcttctcttctttctcttcgatattgttatttattatcaactcacttgcttcaactagcttgcgctcatcaagcctgtttttagcatgattcccattctcagggtctaaatcgatcaatcgtttaccaccatcaatgtaaatgcgtcctaccacatcaaacattgatgtaaaagcattaaacgtcttctcgttcatatctggactaaatcgtcctttaccgtctaatccagcaattccgttatcaatttgatgtgctgttgcataaactgttttattactttctcttagacgtgttcctaactgtctgaaccacagttgcaacttttgataattttgtcggccatctttcgatgccccatcaatattttccagtactaaattttgtaacgctgttacgttgtctaaaataataacctcgtattccggcttaattaatgcgttatagacccatttagttactaacgcttgaatattcggtgcatcttggctttcgagttgaacgacagatatatctttagcttctcgaataacattcgttgataaatcgaagctaaaaagcattttatttccttcaaattgttttgcgagtgacgttttaccagttccaccatcaccataaacaaagtacatattcgcttgttcaggcacagaaccatttggataaaatttcattgctagccctcctcgtaaaatagtttttgtctaatactttttaatcaaaatgcttctgaatcgaaaaatttattgaataacacattccttgcggaatttgtttcgttattgtgtgatttctcagagtacaatggattcatggaaaggatccaacgggaatttgctatgccctcctgtagctttgtctaccttgcaaagtctgttacccgaaccactgttatcactaccaactcattagctgtttcgataatggactagactttcagatagtagtttggaaggcagcttctagctcttttatcaccgtattctattaggcgaggttgtggttacacagtgagcttctgggaaatcccacagtatcgaagcattttccaaaatttagatcgaaaggaggtccttcttccatgaaattatttgtcggtattgacgttagttctgaaaagttagatgtctgtttcctaactgacgacgatcagttgtctacattgtctgaaatctcagtctccaatgacattgaaggtgcttcattaacacgagaaatgattcttgagttcaatgagaattacctatttgatcaaattataattggcatggaatcaacgtccatgtacagtttccatccttcaatgttttttcatgaagacgaggaactaaaaaagctcaatacgcttgtaactatcgaaaatccttttcgaattaaacaatttagacgcatgtttgatgaagacaaaacagatcgtaatgacgcgctaagaattgctgactttctacgcattcaacgttttaccacgtctcctattaaagaagaaaaatacatggcgttacagcgtctgacccgaactcgttatcaattaattaagcaactaactcgtacaaagcaacactttcttgaaaatctaacgtacaaatgcaacacacttgttcgtgaaatgaaagacgaatctactagtctttttagtgctacagtgatttctctaatgacagaagacttcacgttagatgaactggctgagcttcctttggaagctttcagtgacttaatccaagaaaaaggaagaggtcgtttcaaacaacccgagaaaattgccaaggctattcaacgagccatcagatcaagctatcgcttaggcactgtagcccaagaatctattgatattgttctgggcgttcttgtttgtgaaatgcgggctcttgaaaagaatatcaaagagctggataaagcaattgaacaattagttatagtcattccagaatatcaatgtttaaccagtattccaggaattggaaaagtctacgctgctggtttgatcgctgaaattggtcaaatcgaacgatttgaagatcaaacaaaattggcgaagtacgctggattaagttggaaagttaaacaatctggaaactatcagtctcaaaatacacctctgaccaagcaagggaatcgatattttcgttattacttagttgaagctgccaactcagtaaaaaattatcttcctgaatataaagctttttatcaaagcaagtataaagaggtacctaaacaccaacacaaacgagcactcgtcttaaccgcaagaaaatttacgcgtttggtggatacgctactacgtaaccatcaactctacacgccaccaaggagcgtgatagataaataacaatttgttattgacgcaaatccttgaaacgcccgaaaaaaattgattttagtcgggtttagttcagtgcgcttcaaaatagtctattcaataaaaataatctcaaatttcaacttgacttatcaccattagacttcacgatgactttttcaccttgcggaataacttttacgcattcgatcaattcaccgtcagggcttattacacgcccatcttctagaacttgaacagctttcttaaaatctgctttgtttacagtttctgtcacttttataaattcagtgagtcctaatttttttaaagtgtctaccgcatcagcgcgatattcccataaatctgcttgtttacgcgtgtttaccgttccatgcggtgttttgatttttacctttggatcgtttttccgtagctcacgcagatagtctgctaatttatgttcaaaaaaatcaatgctatcttggttactttgcgtttcctttgtttcccattcagcaatacgttcacgttctttatcggcaagctgatagatttccttattcgctttttttaaagcagcgatttttctaaatgcccaatcggcactttctaaactatcaattttccaaccgtgcgactcatcttttagaacctcacttgcttctaactcttcgagttcatatttttctaaggcgttcaattccatccctccatactttcgggcttatcttctgcccctgattgagtaacatttatgaaaacgtggttatcaggatcagccattgcagtgtcataatcgaaactcattcgaattcacctttcctaatacgttcaaggacatctggaatatcgtttacatcattaagaacaaaggtatgatcgggcatagttttccccgtttccatccccaatgcctctaatcctgcattccttaatagtttcacgggaaccagtaacttgttgtctaattcactttcttgaatcgctaagagtgcagctacatcgggtaatccaccaacaagcagttgtaaaatattcgcttctttatggagtgtacaaagtgctgatacaccttccttttcacattcccgttgtagttctttcaataaattttgaattttttcgttaatcatgttattctctccttagaaatatattttttcatttgctcactaattgcttgtcggcgtagtgagcctttttttgtttttcgataatttgctttgctaacaaaatggactcatgatagttataatattctctatttgctttttccattagctttatgtgttcctcataactcatcttctcacccctttcaatttgatataatggtttaaaaactggatggtggaattatgaaatcttctgattggattcaagttattgctatttgccttactcttattgtgtctgtcatttcaattgttcaatcgaatagatcaattaaattaacagaaaaaactatagaagaatctaacaggccgtatgtatctgcatatgtggatataatagatacaacattttttgcaaagtacttagttttaaaaaattttggaaatacaatggccactatatctaagcttacgtttgaaggtcttgaagaagaccaagtaaacagaaatcgtcaaatgaaatctttagttggcgggtcaatagcgccaaaccagaaattttccactgcggttgaacctgactttagaggaaacgtaatagttcagattacttattcagatactcaggggaaaacttataaagatatttttcacctttactttggtcaaactacagatatgatgtggcaaaaagatacttcaaaaaatcgctctgaagaggctaaagccataaataacgctgctcatgcaatagtaaaaactcttaaatagatcacttctttctcctttttaatcgcttaagtgtcttatggttatcgaccattatcggaattgttataaccaatgttagtgaaattgcaacaattaaaatgtaatctccaatattcatcttagtcagccccctcggctggctttttcttttcccatccgatcgctaggagaaagattccgatgtatccataagctgccagcatactaaattttgaaaaaactgggatagctaacatgcacatgattgttgtagctaggttgatttgtttcattttctcctctccacttaaacaatctctaatccatcaacattatcagcattcaagtaagctatttctttttgccgtgctgttaatcgcaattggtagtcttttaagttgcttaatgacacgatttctataacttgttttgccctagtaaaatcaatgcggcgaatatcatagtatctcggtacattaaaagtttcttttaatcgcttgtagatgattccgcggaagtgcccaactttagccaaaaacaaatcatctgacactttatgatcgaagtattcttttgctaaatcccatgctttcttcccaactgctgactgaatttctgctccttcgtgacggttcaatgtgatactatctcgcaattcttgaacatccttcgtaatttcctccttcatcttagaaacgtcgctcttgattaggcgcatttctttcaccaaaactaattgattttctagggttttctctagttctaatagctgattactcattgataacctctccttccaatatgttgtttttgctgattaattttaagtctgataaaaatttctccaacctttcggttagaaagtctagctctctttttgcaagtccatcccgactgattacttctgacaaatcctgatagattagagcgctcgcctctgacaataactcattcgatttttctaatacatctgatagattcttgtagttggaaataagtcgctgggtttcactcagtttgtcttcggcttggttgatcgcctttgatagttgttcatacttagacgatttctcatccacttcttttcgttcggctaacaaatctctatagtttgattctagttgcgaacttcgttcttctaattgtgaataggattgtttcaaattttcgtaatcatccggaactttttcaacaaccacttccttttcaatgactcttggttgttgaacactcatgtcattgatcacttctgaaaggttatcgatttgttcatctttcttttttagttgcttttctaattcacgatattcctttgtggtttttatatcgccagatagaactaactcgactgcttcaggttgagctgaaggtttagaaacttctgttctcaaggtcatcggaagttcttggaatatattgatttgttctgattcgtccatttgatggacgaatttcgcttgattaatgtagttgtaaactgtttgtttttttaacccgattgacgaaaaccacttctcgaatgtgccagaattgtattttgctaatttttcttgcgcctcgatcagtttgtcaccaagttgaatcgaaccattcaaaacgattgtcctcatttcctgctctttaactttgagaaagctagcagtccgatcatccactattgaatagtcgaacaaattttttacttcattcaatttttaacctcctctgattttccaagtaattactaggcaagatcgactgtttatcggcggtttgacctcgaactacgaaggcctatttgatgctagtgatagcaattatttacgtcagaaaatttatcgccgttagctgtcacaggttgcactttatcccatttttttgattaatcgtgattgaaactgtttctttatcaatcagttctgtcacgattctttttgcctcgattgtgtttttcacctcaacattgcttccgcattttgaatttcctttatgaattttgatttgttgatctgaacaacgcttaacatattcttcatatgcttgttcatattcttcttttgagactggcggatatttgaagctcaaaccttcgaatatatttccggtctcttttgatttatcatcattcatgctgtcgcctccttcaaaatttctttaggcgttacttttttagttctgtatttgttctcatctttccatcgtaaaaaccaaatgaacgtatggacatgaatgaaagttgttgaatgtcctggcctgagaattccttctttgaattcgtcgatggcttccatctctttgcagtactcaacgagagttgtcttcgacatcccgtgaaacatttttaggattaagccctgacgataccagtcgtctggtttcatattcttttctgcggattcgattaactctgctaacgtcggcttcttcatgatttcaacctcctatctgattttgtatcgtgatatgatatccgtgatctgcttccaatggtcttctggattgttcaatatttttcgtaggtactgctcagtaatattcaaagcgctagcaacatctggtatgctccaaccattcgctttgaaatgatccaatattttttgtcttgtctcctgtgcattagccatctacgctgctcctttctatgttgaaatgtaaacaagttcgaaaactattttttaaactatattgacttgtgctgagtattactctatactagaggcatagttaaataagacataaaatattgatttatagctttcttgccggtcagcttactttaatcagttttattttttgttgtcttttttattaacgaacttgtttacaaaaataagtatagactatcattcagaatttttcaagtttattctgcgtatttttctaaactttttttgtgagcattcagaaaggttgcaaaatcaatgaatacttatgaaatcataaaagagcttgccaagaaaaagaagatttctataaggcagttagaaatgagattcggctattcaaatggatatttagccaaatggaaaacaaacactcctaacgctgatgaattgccccgtctagctgactattttggagtctccgtcgactatttgttaggacgcgaagaaaagacttctttagcagaaaagcatggtgtatttgcattcgatggcgaacctgtttcggatgaagaagtagagtttttaaaatctgtattagctgcaaagcgggctgcggaaaacaaataaagtgaagtgattaataatttatgcatgaaattaataatcacttattgaacctcgtagagaatttgggtttagaactgtgctttgtagatatgaaaagaagtggtttttattttgctgaggagaaaacgatttttttaaacaatgagctccttaatgaaaattctgactttgaagtatctcacgaactagctcactgtatcaaaaaacatgaagaattatctgcatattataatgctactggatatagtcggcgaaagttagaatttgaagccaatcgaattgctatagagatactattatttatttggtctaacgaatacgattttgataaagaacaactaaatgctgttaaattcatggagtattataaaattccttggagtttagaaagatatgtacgtgaatcaatgagaaatttaggataaaaaagcccgtgctggcacacggacttcaactcaaccctattactaagattgatgaaatattgatattatatcagaatagggtgatctatttgagatttacaaaaaagaatatctatgattttactatcattgtgttagctgttttttcgattgtcttagtagtactggatttttctaacatcatcagcatttcgaaaaatccatttaaaacaatagactccgctatattaatagtatttgcttatgattatttttcgagactaattaaggctgaaaataaaaaacagtttttcttgaaaaacatgtttgatcttattgcaattattcccttcaactctattttttcattcttcaggcttgcacgagtttttcggatagcaagggtaacaagactatttaaacttagtagactagttgggattaccggaaaattgactaataggatagatggttttcttaaaactaataattttagaaatgctttgtatgtcagtgtggttctgatactgatttcagccactatgtattctatagcagaaagtgtcgcttttgtcgactcaatttggtgggccgtagttacaactacaactgttgggtatggcgatatatctccaaatacaccattaggacgtatagctgctattctattaatgtttctagggattggttttataggtatgctcacttccacaatcactgaatatttcaatgcaggcaaggatactaaagacgatgaaatcgaaagtttacacaaaaaaatggatttattgatgaaaaaaatagagtcgttagaagatgaaataaagaaggattaaaaaaacacgatcccgccccggcaagagtatgatcgtgcaaaaataaagcgcctataggcataggcttcttttgttgtgcctattataccaaatgataggaggaaatgacaatgtgggtagaaccattgaaagatgggcgtttcaagtttattgaacgctacaaagacccgtatactgaaaagactcggaaaaaatcggtggtactaaatagccaatcaaaacaagcatggaataaagcgctaagtatcctgaatgataaaatagaaaatgaactggctaaaaagaaaatcgagaaagtcgccttccagcaagtttatactgaatgggaaaataattattttaaatctttgagacctaactcaaagaacacgtatgtagccattcgaaaaattattttcaagaatataaacgaagacattctgatttcaaatattgatacaagattgttgcaaaacttctttgcctctctcgattattctcagacttatatcgcccatatcaagtcaaatcttaacttagtatttaaatatgcgattaaactaggctacactgataaaaaccctgttgaaaacgtggagattatccctaaagcgaaaaccctagaagatatagaacgtattgaggataagtaccttgaaaaaaatgaagtaaaattgatcctagatcaactttataaaagtcggtcaacctttcgtgtcggtcgattagctgaatttatgtatttaacaggagttcgctttggcgaagcagtcgcattaagagaaggaaattttgacttggataataatatcgttcacattagaggtacaatcgactacagcaaaggttacaaacaaaaagcgataggaccaactaagacccagaaatcaaatagagatgttcaattgacccaacggacggttgagctagtaaaacgtacttttgaggaaaataaactagacctgttatccgaatctgattttaataatgatggattcgtttttgtgacccgaacaggtacgcctatgcaaaatagttcattcaatcgttcttttgctgctgcaggtaaaaaaagtggaattaacaagcgtttaacctctcacatactaagacatacccacgtgtcattactagccgaacaaaatactcctttgaaggctattatggatcgagtaggccatgaggatgccgacgttacaaataaaatctatactcacattactgataaaatgaaaactgatttaatcagtcaattagaagagaatggtttatagccattctttttattttcgccccttttctgccccttttaaccttgcatcaaaacaaaaacctgctagagccttacagccccaacaggtttaatgtcgatactattttacagcatcttttaattgttttccggctttaaaagctggtgatttgctggctgcgatagtgatttcttcgcctgtttgagggttacggcctttacgagctgcgcgttcacgtacttcgaagtttccaaagccgattacttgaaccttttctccatcttttaatgaagtttgaattccgtcaaataaagcatctacggctgctgttgcgtcctttttggtcaatcctgttttctctgctacttgttcaactaaactttgcttattgatcataatgtatagcctccactatcttttttaatgtattccaaagacaattctattcgttcttgcggggaaaggcaacagttaacactcctttttctctttttttggattttttatttttttatttattagaaattaaaaaataaaaaaattattcaatttttttaaaataatttgtacatttccttattaaattggtattctaaattataatattttatattgataattagttaaataacaaatataacaaataaataaggctggcacgcttgttttatcaggtttttaagattatattaaataaaaaaacattttaaggggttttatttatgaatatgagagggttaatgaagaaggagacatctcgtcgtttgcagttggttgaagaattatattatgcaaaggaactcctgacatcggaacaattaatggaatcattaaattgttcactcccagcattaatcaccgatgttcgttttcttaatggagaaaatttgccgtttaaaattacgaaaatcaaaggactctatacgatcgactttgattcatatgcaacgattgatgcagtttatgcgtatattttacgcactagtttagaatatcaggtcattaacagtctactttttgaaaaaagtcgcggcatccaacctgctgctgatcgattgaactgcagcttttcaaatatgcagcgttacttaatcagcatcaagaaggaagtgatcaaatgggatatcacggttacacatcgaccgttacaaatggttggcgatgaaggagcaattcggcatttgttttatctcttctttaaagagtcgcgtatggagtttgctgattacggattttctcagcgtctattgaattctgtggatgagttaattcgtcgtattctagaagaaaatcaaattacgaataatatgaacattcatttccaattaatgcatagctttttgattgggctgcaacgtcaaaagcatgggcataaaatgaagcggattaattatacctaatgtgaagcagcttgaatcattggtacgtttgatcaagcgggaaacatctttagagtttaccaatgcttgtctaaaagagtgcttatggccgttgttttcacatcaactgcttctgaatcgtaaacagcaagcactggttcacaaaaggaatagacgcctagcaaatttctaccatacacattatttattgctggaagcggtcagcgatctattgagtacaccactttcacaaaatgaaatggtcgacgctgctcggctgctcggcaatgaattattttgctactatccagaaaagcattcaatcgaaattttgcacgagtcagaaaaaattatgttgcatttaattgataaaaaatactatcgagaaatcaaaaagcttgagaatgttgtcagcaactttttatcgccgcttcatcaggaggaatttgttccgctgtatatcagttttttgataacaacgatagataatctgctgcagcgtttaattaattctgacaggcctatcaaggtgcttctcctgtcagatacttccaccactcatgaacgcttttggcattctgtttttcctgatttcatcaaaggtgcagtcacgtatgaacactttgagacgcccttcatcaagcaggatcaactgactgacttaacacagcaatacgatctgattgttacgaatgttacgatgaaggatctagtacctgcttgtcctttgattgcgatcaacgcttttccaacggcaaaagattttgatcgaattcaacagtttattaatcaatttgacccacttttatcacgaaaggaactacatcatgaacttacgccgtctactgaaacgagatagtcagcgacaattacagttagttgaaacactctattactctcaacatccacgttcgagtgaggaattatcgtcaatcattcaatgtacgatacctgcatttctaaatgatattcgcgccatcaacaatcaaagcgagtattacaagatagtgcgagaaaatagtctatatcatttagaactcaaagataatgccacaattgatattttatattcaacgttaattagaaactcaattgcttttaaactgttagaagcaatcttttatgaagaatcttatacactattagagctttcgaaaaaactattctgcagtctgagtacagttcaagcatcaatgaaggacctgcaagaaacattagggcgctggaaaatgtctatccagcgtcgcccttttcgtctaacgggtgatgagacagctattcggcatttatattttttatatttttctgagaaaaaagaagcccgtgaaaacacacgtttcagttcggaattttttcattttggcgaaaaaattgttcgctcgatagttagagaaaatgagctatcgttatcgctggctcagtatagccgtctatcaattactttttttatcagtctagtacgaatctcaagaggacatcgtattgttccgaaacgattacgatcaactgcgatcagcgcacctaatccatacacagtcaacaggtttgagccctacctgcggagagagctgggaattctttgttccgaagacatcgtgaaggatagtttttggctgctttattccgatttattcttattaggagataaacaaaagaaaaaggtcatggagaataattattctttagcctatcattatgaaatacaccttgagttagcagaaaaactcagtagaatgctgatcgttccactaactgcaaaacaaaaggatcaagtagcgacaatcttgattaatcagcatcttttccacgcaaaaacaaaggaaatgatcagtattctccaggatcgaaaaaaggattgcttgcggttgctagagacttttcatgctcattgcgtctatcagctgcgtaagctcatactcgaatttactgaggagtatcatctctttaattcagatgaatttattgataactatatctatcaaatcatagctactgttccaaactgcttaaatggaatgaggcgatcagaaaagcccgttaaacttttggtcgtgtctactgattctattatgcaggaaagcttattgacggagcttttgcgtttatcacttcgaggaaactatacgattcatcaaataaatgcttcgcaactgcataatcgaagctattcggagctttttgaagaacacgatattgtcatcagcacctccacgtttgatgtaccgaactgtcaaacacccatcatcgccgttgaactttgtcccagcgtgcactctttaaataaaattcagataatggtagatgaaatcaacaaagccaacaatcagttgctgcgaacctaaaaaaatggacttgagtacgttcactcaagtccatttttttcagcgactaaacgggttagctctttttccattgatgccttttctgctgttaagctgttgatcattcgctgatacttctcagtgccgttctttttccgaaatacattcaactgaatcacagaaaaaagaatcataatcaacgctaaaacaataatcaccagtgagataacgcttaattccattctaaatagtgtatataataaaacaatcaaaccgatcacgatttcgagaatactaagctttgctcgccgccctcccccaaagatgatccgctttagtaccgagccgtgtaataattcttcataacgagtcaggcgcgcttctaaaaagctgacctgctcttttaattgattgattcgttgtatatctggcatagtaacttcgctcctccatctccataatctattattaccagtaatttccattttcgcaaatattttattttccaattataaaaataataatttttatcaggcagccctgatcaataagaacattctaagcatttaacgcggaagattaaaaagtgtaaaggatttcatttggtcgcaatcgttcaaattgtataaaaactttgcaaattcttatttgaaattgttcgaaattcctgtacaattgttttgtaagcgaatccacttcgtatacgaatcgttaagaaggagtgtgtcaaatgattattggaattcccaaagaaatcaagaacaatgaaaatcgtgttgcccttcccccatctggtgtatttgatttaaccaatcgtggtcatcaagtattagttgaaaaagacgctggtaaaggttctgccattacggacgaagagtatgtggcagcaggtgcaaccattatcgacagtgccgcagatgtttgggcggctgaaatggtgatgaaggtcaaagaacctctacctgaagaatatcaatatttccgcaaagggttgctactatttacctatttgcatttagcagcaaacaaaccattgactgaagcattagttaatagcggtgtcaatgcgattgcttatgaaaatgtccagccagctgacaataccttaccgttacttgctccaatgagtgaaatcgcaggacgtatggcggcacaaatcggcgcgaattatttagaacgtgtcaacggtggaaaaggtattctactatctggtgttcctggtgtgcgtcgcggaaatgtagtcgtaatcggcggtggtgttgttggattgaacgccgctaaattagcattaggtctaggtgctaatgtaaccttgctagatgtcagcgttcctcgcctgaaagaattggatattattttcggcaacagcgtacaaaccatgatgtcaaatagctacaacattcaagaatgtttgaaaacggctgatttggttatcggtgccgtattgatcccaggacacaaagcaccaacattggttaccaaagaaatggttgctcaaatgccggatcatggagtaatcgtggatgtcgcgatcgaccaaggcggaatcttcgaaacagaagaccgcgtgactactcatgatgatccaacctacgtgactgaaggtgtggttcactatgcagtagcaaacatgccgggtgccgttccacaaacagcgacatatgccttgagcaacagcacgatggcgtatgcaaatctgttagcaaataacacattagaagaaatcttgaagaataacttagcccttcgacgtggagtcaacacttacaatggcaagctgacaattgagccagtagctaaagacttaaacatggaatatacttcgattgacgaggtattaaacgaagaattaatgatgaattcataaaacaggaagagcctgtcagcgtgatgctggcaggttttttgctataatgaagaagattcttatattttaggaggttcatcatgcttttttctgaaattctatatcagcgacctgatttaacacaatatgaaacgctctttcatcaagttactcaacaattttccgaagctccaaattacccagccgcaaaggcagctctagaaaagctaaatcaattacgtgctgagatggctaaaaacatgaaattggcctacattcgccactcaatcgatacaaaggacagcttctatcgtgaggaaaatgacttttgggatcaacatgctcctatagttgatcaaatccacaatcatttttacaaaagcctgctatcctcttcttatctggaacaattagaaaaggatttcccgacaacactatttctttatgcacaggatcaactgcgtctattagatgactcggttattgctttaaaacagcaggaaaatgaaggaattagccaatacactcaattgatcgcttcagctgaattggactttaacggtaagaaacggacactgtcagagttatctgccttctttactgatccaaaccgagaaatccgaaagtctgctcaaaaactttacgacagcttttttgtcgcccacgaagaagaatttgatgagatctatgatcgcttagtccagctgcgccatcagcaggcagaaaaactaggctttaagaattatgtcgagtacggagatcatttaatgaatcgctggagctatgatcgtagtcagctacaggatttccgccaatttattctggaaaaggtcgtaccaatcaatcaaaagctctatcaacgacaggctgatcgcttggggcttgaagcactcttacattatgacctgcccctcgtttatccagatggcaatcctcgtccgcaaagccaaggagaagcattaattcaaaaagcccaagcgatgtatcaggaactttccgatgagactggcgatttttttgacttgatggcgcaacaaaaattcatggatctagccagtcgttcaggaaaacaaagcggcggctattgtgaattcatcgatggtattcaaatgcccttcattttcgcaaattttaatggtacgtcagatgatgttgatgtcctgactcatgagacaggacacgccttccaaagctatctgtctcgctggatcaaagagcctgagctggtttttccaacttcggacaccgccgaaatccattctatgagtatggaatttctaacttggccttggatggagaacttcttcggaacggatagcagaaaatatcaatttgcccatctaagcagcgcactgcagtttttaccttatggtgctttagttgatcattttcaagaggaagtgtatctgcatcctgaatggacagcgcatgagcgaaaagcctgctggcgtgaactggagcacagttattgtccggaacggaattatcaggcctccgaagctttagaacgaggaatttactggtatcgtcaaggtcatatttttgaagttcccttttattacatcgattatactttagcccaggtatgcgccttgcaattttggcaacgacagattgttgaaaatgatccatctacttggcaggattatcttgcgatttgtcgtatcggtggaagtaaaacctttttggaaacagtccagttaggtcaccttgcctcaccttttgatcaggaaaagatgagccgtcttttaacagaagtcgatgattacttgtcacacatttcggaaaaggaattacgctgagataagaaaaccttaggagcagattactcctgaggttttcttattgctttcatagcaacttttatgacaaatgaaaaatctaaaattggacgattgtgctgattgttgtgatttttttggagggaatgtcatatatttcttatgcgatatttttacttcgttaattactacagatagctcagttataagattctgctaaagagtctgttcgctatattcaagaaaattaataattagagctcaagcctaacaaactgagaaaagcagaattcgcaaaaaaaatccctctgcatagagaggaatcctagtatttatttaggaatcaccatcatccgatccccactcatttgatgaagtgcgatcggtcgttggtaaaaatcattcaatactttttcttttaacagttcgatccgtggtccttggttgaagattttaccttcgcgaatcattaaaacctgattaaacagcggcaggatttcttccgtatggtgcgtgacatacagcaagctcggtgcatctgcagtttgtttcatctgtttaattcgtgccagcaaatcttctcgagcaaataaatcaagaccattacatggctcatcgagaatcaataattctggttttgccatgagtgcacgcgcgatcagaacgatttgcttctccccttgcgacaatacctgatagactttgccgattaattttttcgccccaagtgatagtaaaagctgcttggcctcctccatatcagcctccgagtatttttgataaatcccaatactggcaaattttcctgacaatacgatggcctccgcctgctcctcgcgatgaattcgttcctgcaatgattgacttacccagccgattcgtttcgttagatcaggaatagatgtttctccgaaccgctgacctaaaacggttaatttaccagaagtgggccataagctgcctgaaatcatattcagcaataagctctttcctgcaccgttcaaccctaaaaccgcccaatcttcgccagctttgatacgccaatcaatatcctgcagcaaagcattttgttgacgaataaactgaacctgttcaaaagctaaaatttccatatttcttcctccatcttatcccttttaacaatcttatcaaaatctcacagaaaagatacgtaaaatgatataatttatcaaatgacttagaagggagttttacctatgaactatgaattatcagccagtaccttcgctcctactgcgaaggttcatttacaacgaggagaaaaattaagaattgaaccaggcgcgatggtttaccagctgggagacatcgagcttgagggacatatgaatacaaacggaaaaaaaggacttggtggcgccttaagtgctttaggtcgttcagtaacaagtggtgaaagcttctttatcagtacagctactgctcgctccaatgaagcgatgattgctatcgcccctgccgtacctggaaaaatcttcgccttagatgtcggagctgaacattggcgtttgaacacgggggcttttcttgccagtgaggagaatgtcagctaccaaatgcaaagacaaaagctttcaggtgctcttttaggcggtacgggaggactttttgtgatggaaacaactggacgtggacagattttggtttctgcttttggtgatgtagaaaaaatcgaattagatggacactctccagtcattatcgacaatcagcacgtgattgcttggacaaattcgttagattacaacattcgtgttgcttctggcacttttggtttcaagactggcgaaggcgtcgtgaatgagtttcatggccgtggaactgtttatatccaaacacgaaaccttgaaagcttcgccaatcatattgatccctttatccctaaatcttaaagattcgctctcagcattgtaacaaggagaaataacaggtaaaatatgggggatactgttgcagaaagctggtttatatgactgaaaatacaagaaaagatggcgggctgaatcaaacgccttcacgggtggctcgttatcatagcgaagcggctgcgccgcaaaagaaagaatataaaaaaaagacacctcaagctactgagaagaaaccgactgtagcaccatctgccgcttcgaacaagcagacaaacgctcaggaaaaaatggttcaaagtacagcatggctgacaatcggtaatattttctctcgtctgctgggtgctgtctatgtaattccgtggatcgcctggatgcaaccccacggtctagaagcgaattatttatatacgaagggctacaatgtatacgcgttgtttttaatgatctctactgcaggaattcctgcagcagtggcaaaacaaaccgcccgttataattccatgaatgaatatggattaagtaaaaaattactattttatacgatgcggctgatgaccatcggaggaatcctttgtgcagctatcatgtatctaggcgcgccatacctatctcaaggaaacgctgatttagttcctgttatgcgctctttaagtgttgtgttgctgatctttccagcgatgagtgtgattcgaggtttcttccaagggaacaacaacatgaagccctacgcattgtctcaaatcatcgaacaaatcgcgcgggtttgctacatgctggcttcggccttcattatcatgcagatcaacaatggcagctataagactgccgtggttcactcaacctttgcggctttcattggtgtagcttttgcgatgggtgtgctgctattttcattacttaaggaacgctcagcctttcgtgagctgattcgagagagtaataaccagattactttctctggaggacaacttgttcttcaaatgattcaacaggcgattccttttattattgtcgggagcgccattagtatttttaaactgattgatcaatattcctttgaaaaaatcatgtcgatcgtaacagattactctacggcgaaaaatgctgatctctttacattaatctctgctaatccagataaattaacaatggtcgtgatcgcactaggaaccgctatggctacagctggtctgccgttgattacggagcgctttacgaaaaaggatcacgagggcttggcaaaattagtgacgaataatatccaattgcttttctttgtgatgatgccggcaactgtcggaatgattgtccttgcttatccgttaaatactctattctactggccgaatgcccttggctcagaattattagcagcctcctgcgtggtggggatcatgatgggcttattcatggtctgttcaacaatgctgcaggggcttgatggcaatatgcaggccgtatggttcttatgtattgggatatttgtaaaaatcgtcgcgcaattccctttaatctttatgttcgaggcgtatgggccgcttattgcatcctttgtaggatttttagtggcaaatatgtttttgttggatcgcattcatgtcatttcgcagtttccatttaaagaaacaatgatttctatcgctaaagtcacagtaatgtccattgttatgggcgttgtcgcttacatcgttaagttcggctgcgaagtcatcttaagctcggattctaaaatgcaatcaatgatcattattatcatcgtagctgcctttggtggatttacctacatggttctagccttaaaaacacgaatggccgacaaattgttaggctcacgtgtggatggtattcgccgtcgattacatctttaaaaaacacacccctgctgtatatcattatcctgcaacgggggtgtgtttttatgtgctaaaaaatgaagcttccttgagcttatacttagcatttatttgctgtgcttcagaagattgcgccaatcaatgatcgttttattgacatgattcaatacttctaattccaattttttcgtatctgcgacttcctgttgctgaaacgatattagcctctcgtaatttttttgcagcagatcgtgaattgtctgagtcccttcagaaaggatcaaactgttcgcctctgccttcaattgttcgattacaattggtgtcgtttcttgaaagtacacatagccatattggttgagattgttcttatacgatcgcagcgttgtcaatgaagcctctaagacagctgctccgtctgccgtttgcttcggtatctgaacagtttctttttggcgctgcggctttttctttcgttttagcgcccatcgcgtaatcaaaaaagttgctagacaaacaatgacgtttgaaagcaagacttctggacgtaaaaaattttcaagcatgactttcacttcctccaagagatgataccattataccgaactagttcatagtaagggatcatttttcttaaaaaaagaaaaatgacaactatttttttgcatattgaaacataaaaatacacgtcgggaaaattcccgacgcgttgattctaactattttactgttacacgaaccttagccaatgcctgttccaaatctgctagcaagtcttctgtgtcttcgattcctacagacaaacgcagcaagccatctgttatcccttgcttttctctttcttcccttggaacacaagcgtggctcatcgttactggataggataagatcgattccacaccaccaaggctaacagccgcaatcggtatctgcaacgcctctgcgaaggtgtaaactgcttcttggttaactaactcaaaggataggaccgctcctccagaggttgcctggcgtttgtgaatgtcatatccgggatgattagataagcccggatagtgaaccttctgtatagctggatgattctccagcatttgactgattttttcagcgctgcgagcactttgctccattcgcaaagccatcgtttttaatcctcgcatcgtcaaccagcaatcttcgactcctaaaatcccgccaagaaccttttgctgcagtttgatttgatcgtgccatttttcatcattcgtaatcactaaaccggccaccacatcactatggccattgataaacttagttgcactgtggatcacaatatcgactcctagagccaatggtttttgaaattgcggtgtcataaatgtattatcgatcattgtcactagatgatgcgccttcgcgatcgctacaacgccagcaatatctgtcactgataataatggattagatggtgtttctaagtaaagtcctcttgtattagggcggatcgcatgctcccattcatttaaatcagtttcatcgacaaaggtcacttcgatcccaaagcgcttcataacttcattgactaattggaatgtgcccccgtatatgctcttgcacataactagatgatcgccttgactaaaactcagcaagaccgctgaaatcgcacccattcctgatgcgaaggcggtcgcatattccccattttccagtgccgcaatcgcttcttctaacgcggtacgggttggattgccaaaacgggaataggtatatggctgtccttccttaatagagtcttgcttaaaagtcgaacattggtaaattggtattgaagaagcgccggtttctccatcaaatgcatggtatccatgaatcatttttgtcttatcgttcatctcaaaatcctccctactcatttctcacaagtttagcttaacactgttcgaagcgttttcatgttttttggaagaattcccataagaaacttagccgattttcaggaattcttggcgctttctaatggatgatgaaatagaagattgttcccaacagcaggagcagactaaaattgaccatacagaacaaaccaaggaacctcttcgtctttctaggataataaactcggaataaattatagccgattaaattagccaatgaggcaatcaatgtccctaacccgccgatatttacgcctaaaatgaccgcctgttgattggatgtaaacggcgcaatcaagaaggcagccggaacattagaaatgacttggcttaaccctaatcctgccaaataaatttcttttccgttcaaagacttcaaaaaagtattgataaactcagcatctccaatattaccaacgatgataaagaaactgacaaaggttactaataatccgtaatctacctttttgtacaattcacgtcggtaaagtagaatgattagtgctactaaaggaatcacccactgatatagtagaatatccaaaactacaaaaatcattagcagcatcaatcctgtcagcagcagactttcttttcgattgatctgattttcttttagctgaatttcgtctaaggaatccttcgctaccagcagagtcaaaaatcccagagagatcacactaaccaaaaggactagcgacatccaagacaaaaattgaacgagcggtacatgataataatcatacaaaaataaattttgcggattgccaaacggaaaaaaactacttcctagattagccgcaacaatgatcaacacgctgcctagaaagcgtcctttaaatttcggcagtatagacaacagctttaaataaatcggcagtaaagtcaaaatcgccacgtcatttgtcagaaacatcgatcctattaaagatagtacaatcatcaattgaactaattgacgactattcttggaaaaatgcagcagcttttgggcaatataacgcaaaagccccacttcttcaaagccttgaatcagcaacatcaaaccaaataaactaaaaattactttatagtcaataaatgtacttgaaaaacggccgatcaaacagctgataatagctaagactaatgaaatactcattaagagattcgctttgaaataccctattattcgattcatacttgctcatcttctctcatttttaaaagctgctggcagttaaacacccttaaaattcaatcgttgcgcagcaactttctattacattccatcgaactagatctcaaactattttgaacctctcatgactaaagtcacgagattcttgggaatagagcagacttgcgaacggatttctttgcccgcagcggtgtctcttattgaccaagctatccccgtagttcctacggttaaggtatctagactattacttgtatttgtagaccctcagccaaaatatttttactcgcattgatgtcgcgatcatgatgcgcatgacaaacaggacaagtccattctctaatttcgagtgacttcttgccgtccttgtgtccacattttgaacaaagctgactagacggaaaccatttatctactttgatgatctcacgaccgtaccattcagctttgtactgtaatttactcacaaaactaaaccaagagacatccgaaatacttttggctagcttatgattacgcaacatacctttcgtatttaagtcttcgatacagatactatcgtgatttttgacaatctctgtactcaacttattcagaaagtccgtgcgttgattgattactttttcgtgcaatcgggcgacttttttcttttgtttttgatagtttctagcctcaaaaagttctttccccgcttttttagcgagtaacgcacggcgagacaatttacgttgttcccgtttgagtgttttctccattttggacgtgaatcgattattatcgattttttgaccattagaaagaatcgcaaaatcagtgatgcctaaatcaattccaatttctaagcccgttttaggcaattctgggacttcttcttcacaaaggattgagacaaaaaatttcccacttggatttttccgaatggttgcgtttaaaatccgtccattgagctctcgacttttcgcaaatttcacttgccctaatttaggtaatttgatgatgttttcaataatcgtaatgctcttattgacgtttttcgtggtatagctttggacgggattctttttgcttttaaactgtggtcgcctattttgttttttaaaaaatcgagaaaatgaatcggaaagattttttaccgaggattgaagcgcaatactatcgacttcttttagccaactcgttgcttcattctttttcatctgaggcaacatggcagaacaggaattataggttaaacctttgccatttttagaatattcttcgttccaaagagccaagaaatagttatagacaaaacgaacacacccaatcgttttaatgatcaaaacctcttggtcggcgttggggtagattctgaatttataggctttgtgtcgcagcatagcattcacctcaatctgtcgaaattttttcgcattgaatccgtttccatcattttaacataggtatatactaaatttgaatatgtcggtcgtttaacatagctaaagctatgccacgaccgaatccgattcatctgcatgaataaagtcgcgagtgttctcggctaactcataaactacgaaaagcaaaaccaaggacagcgagctcatgagtaaaacaaaaaagtgtatccagaaaaaaatagaccctcaaatagagagtctaaacaatcttttcatcatgcttgttcttgattcacataacctgaatagtggcttcgtttacttcggttatagagaactgaaataatttgaatcacagaaacgataacaataataaggctaatgatcaaacgaattgaagctgtatttcctgtagaaatgtaatgcaagacatctcctctagaccaggtttgttcttgaagcagttcaactaattcctggctaaaaatattattgtgcatcaataaaaagacccacataactgccgaaacggcagtgtcaataatagaccaaaagcacacacgattcgtccaacggcgatcaatcaatttcaccacaccaacaattaatgtcagtagggttcctataattaacaccggaatcaaaaacattgtaaagctgttactgaataatggaacattaaaactaacattccctgattcggtgaaaacgtgagagaatccacttaccgatacaaatatgaaaatgacactaaaaacaatgacggcaataatttctgctattggatcagataaaggaatcagtttttctgtagtcaacggcggcaaatccgtcaccttccaatcatcctttttcctgctatttaaagcacctgtccgctcagcgatcacaaatcccactgtcgtccatacaagtgtctgcatcactccagatacaccgctttgaattccagattgaaacatcacctgaagaatgcggctaacctgattgctattttgctgcagcgtctcaaaaaccccagtcactgccccaacgataactgtaataatcccgacaatcggaaccaacagcttcagtaagcgaatgtactcatcatacacctgcggagaaatgagataacgagggttttgccgatattgttcagccagctttgtcggagaacccatcgattgcagcacctctttgatctcagcatcatttggctgatctgacagcatatcataaatattgctgcgtaattcttgggcgacctctgcccgttccttttccggcaattgctgaacaaccgccgcgatatagcgttcaattaaattttccatagtcactcccccgagtagatgtccattagacttttttgcatttccttccatgcttcaaacaacttatccttaaccatttgaccttttttgctgatcgtataatacttccgcggtctgcttttagtggtatcccaatcactttccagcagctcctgcttttccagccttctcagcaatggataaagcgtattggcctcaatctccattcctcgctcctgcaatgtctgcaaaagtgcatatccatagtgaggcgtatccaagctgcctagtacagccaaaacgagatttcctctttttaattctgtcacatagttctgaacaatatccttatccggcatatgatcacctcttcacatccattatactgtgccacgcacattatagtcaataaaataatgtcgtgaaatagaaaaactctcgaaaaatcactttcgagagttcacgcttatttagtttctaactcatgtaagaacaatccgctcaacagcttcggttcgaaccatgttgacttcggcggcataatttttttcgcatctgccaccgctaaaagatcggtcatttgtgttgggtacattgaaaaggctaatttccagtcgcctgaatccacaagcttttcaagctcttccgtcccgcgaatcccaccaacaaaatcaattcgtttatcggtacgaatatccataatcccgaaaatctcttccaacacaaatttctgcagcaaggccacatctaatttttctactggatcagtcggaactttttccggtttgattcttaaggtataccaagctgttccatcatataactggcattcgccggctctttcaggctttttgatacccgttttagttacttgataattttctgctaaacgatccaggaaatcggatggtggggctacctttagtacacggttgtattcccagatggctaattcgttctcaggaaagataatcgacaggaattgctcagtttcaggattttgttcgccagattggcgtttctctaagccgatttttactgctgattctgtccggtgatggccgtcagcgatatacaaggcgtctacttctgaaaatagctccgtcaattgatcaatcgtttcagtttgatcaattacccaaacacgatgcatcacctcatgatagctggtaaaatcatataccggctggtgatctttttgccaggttttaatgatcgtttggatttccgactgtggacgataacttaagaaaatcgggctcgtattggcatcacaagtacgtatatggttcatacggtcaatttctttttcatgacgagtaaattcgtgttttttaattttttcatcaatgtaatcactaattgaagtacacgcaacaatcccagtttggctgcgaccattcatcactaattcatagagataaaaacagtcatctgactctttgaatagccagcccttttccaaaaactccgccaaatttgctgctgctttttgatagaccttttcatcatagggtgaaagctctgttggcagatcaatttccgctttatcgatatgaaaatagctgtagggattatccgctgctaagtctctggcttcctgtgaattaacaacatcatagggcaaggcagctactttatcagccaagtctgttgctggacgtacgcctttaaaaggatgaacctgaaccattaaaattcactctcctcatcccgcttgattgcgcgaacacgaacaatgccttcatttttacttaattgctctacaatcgccgcgattttatcaggatttgtctctgaaacatctactaaagtatacgcatggtcatcttttccgcgattcaccatattatcaatattaacatctaaagaggcaatttcagaagcaatcaaccccagcatattcggtacattacgattgataatcgtgattcgataaggtgattcaaaggccatttcaacatttggaaaattaaccgaacgcttaatgactcctgtttctaagaaacgctttaaaccgcgagcagccattttggcacagttgacttctgcttcttcagttgatgcgcctaaatgcggcaaaacagtaatcttatcgttatgaagtaatttttcttccgcaaagtcagtggtaaaaccagcgatacgatcttcattgactgcttttaccactgcatccgtatcgacgatctctccccgtgcgaaatttaataagcgagcggtttgtttcatttgcatcaactcttccgtgctgattaaatgatgtgtttgctcagtcaacggaacatgaatcgtgacgaaatcacaattggtcaaaacttccttcaaatcttttgcccgttttactcggcgagaaatactccacgccgtatccactgatacataaggatcgtaacctgtaacttccattcccaaacgataagcatcattggctaccatcgctccgatcgatccaagtccgataacaccaagcttcttgccttctaattccgttccagcaaactgcgatttttgagcctctgcttgttcatcaacattggctccttctaatgtctgcacccaactgatcccttgaaccattggtcggacagataataataagctcgcaatcaccaattcttttaccgcattagcattcgcccccggtgtattaaacaccacgattcctttttccgtacattcttttacaggaatgttattcgtaccagcccccgcacgagcaactgctaaaactgattcaggaaaatcataatcatgcagtttttgactgcgtaaaataataccatctggttcttcgctttcattaatacggtaattttcattatctaaccgcgccattccttccggagcaatcgcgttgaatgttttaatctgaaacatctatttccctccattttccttctcaaactctgccatgaacgcaaccaaggcttccactccttcgattggaaaggcattataaagactcgcacgcattccgccaacagaacggtgtccctttaagttttcaaaaccttgagccaaagcggccttattgaaggctttgtccaacgcttcatcccctgtcacaaatggaatattagtgattgagcggctgtctttttccactggacttttaaacaaacttgattgttcaatcgcggtgtatagtaattgtgcttttgtttgatccttcgctgtaattcccgcaacgcctccttgctccttcacccattcaaaaacaagcttcgcgatatagattgcataagtcggcggtgtattataaagagagttattctttgcttgcagcgcatagtccaatattggtgcgaaaattgcttcttgattgagcaggtcttcacgaatgatcacgaccgtaagcccagctggaccaatatttttctgtgcacctgcataaatgacaccgaaatcttcgactttataatcgttggctaaaatatttgaagacatgtccgcaactactgggactttgccaaaattcggaatctgcgcaaacgctgttccttctatcgtattatttgttgtaatatgcacataagcggcatcttgatccaccgtttctggcagttcaggaatgtaggtaaaattcttatcttcacttgaagcaattacttctacctcaacattatccagtgcttttgcagcactaatagcttttttcgaccatgaacctgtatttacgtataaagctttctttccttgtgccagattcaacggcagcatagtaaattgcaagctcgcaccgccttgtaagaacagaactttatagttttctggaatagccatgagttctctcattaaggtttcagcctcttggatgatctcttcaaataaggaggaacgatgactcagctccatcaccgacatgccgctatttttgtaatcaagcatttcggactgtgcgatctccaacacagcttttggtagtaccgcgggacctgcagaaaaattgtaaatcgtcatacttattctctcctttttcctattatgaaaaatatttatccatcagccctttaccattgacctttaaagcctaaagtcacaatgataacttgctttaagatgtgatgacaattataacagatgtaactaaatgataaaagcctaattttaaattaattacactgtaatttgatgagttttcagaaattcccacgtttctttacatgaggtttgcttacagaaagacttgaaaaaaatgaaacgttcaccagaaatagcatattaaaaaagctctcactccgtaatctacacagagcaaaagcgtctatttgttctttgtgctacatattgtcacaaactgtaaactgacagttgctacaaaaagtagctttatgaggcctgaaagaaaattttgtacactaattttatcgtaaaggagtttaaaggaaggtgggattttttgaaaataggaaataaattgaagaatctgcgtaacgcgaacggctataatacacaggaggaaatattttaatggaagtctgcaatatgggtttccaccttataccggtattcttagagaaaccagcctgaaaaaaactagccacccaatcaaatcgaagagaaagcgaggataaccctgtttgaagttcttattttaaacacttgagggcatgacaaagaagactatcctaatgaaacgaaaagtctattttcttttcttttttcgcttgttattgccggtggccgatttagtttttttgctactcttacctacacttgtagtttgagtttgtctatttttgaatcggtttatcaaactcattgctgacaattgctgcccgctcaagtgtccaatgttgtttgaggatttctttctgggtattttttcttgcaaaacagctttttcttccaccgctagatttttagtcaacagtcccggcccagcggaatcttctaagtaatcattggacgtattttgccgagatacttgagcatctatcatttcttgtgcttcagccgaacgctcaacaaataagacatggacatcctcgatagttttaccctttggcaggtatgcttgaactaaaaccactaattctgtctcacttaaagttcgcggatcgaatccatgtggtaccataattttcagttcttctctgtctacttcagtactttgttccactggttcttctagcttctcattctgtggttcttcataatgtttgacatttgtcgttttaaagcagtcaaaggtcataaattgggaaaattgacggacttctttatttttgaagatagtcagttcagtcaatagcttgagcaaaacggctatttcctcctcttttctttgcggatctacatccttcaatgtccatttatgctttcttccgtttgcatctttaaaaatcgagatcagattgtagctgtctaaacaatcctcagcttgcgatgtagttacggcatataagtatttaacggctgaacgataacactcactggattgatagtactcctttttattattaaataagcgatgaactacggcatcccaatcgccactttttttgaaataaggcttaaacagactactgaaccgacgcaatacatcatttggctcggcggttaaataaatatttgtcactaattcctggcagataaaagaaaagtcactaaagaccagcgcattcctaactaaaatcgctacaatactttctataatgttcgttgcatcatgggtgttgttatagtattcattgaccttttttctaggcttgcccttttcatggtaaaaatttggcgttttcctaatggcttaatagttgattttacagtcatgcttgcacgctcctcttcatccattctgattgtctgtttacataaaaattttaccgctttttgataaaaattcccaatccgtaatttttattttttttaaaacgatacaatcaagcaaaaggtataaaaaagtgcccgaaacctgataaaatcaagcttcagacactacttttgatttacttaaaacatcccactaagccacaaactagctaatactactgccattacagttattgtaaatacaataacgatcactgtttgagaaagaaaatcttttccgaagcttcgctcttttcttctctcctctacatcttcacattccatataagcgacaatctctttataagttttgatatttttctctttttttattttctcgattttaagcgccgcccacatgccaactagccacaagacgaacgggatcaaaagtcctatattcccaaataacttccaaacaggtccgaataaaatcgctgctgccccaattgttcccaacatgatatagctgtacctgttcatctcgtcttttttaatcacatttttcatagtttccacgtctcctttgacaagttcatctaaagttacgtcaaaaagaacactcagcaataacagattatgaatatctggatagcttcgttcattttcccaatttgaaattgtttgacgagaaacgtaaattttctctgataattcttcttgggaaaatcttgcttcttccctcaatcgtttaatctgtttgcttaaattcatctcatccgctccttcatcctcaccataaggcctattgtggtttcccactagcaaaactctttatcataggccctttttcccttgtcaaaagtctttatcactcttctaatcccttatttaacagtatttatacttaaaaaacttaccgtccaaagatattcatcgcaccatgcagtagcatggttgaatagcaatttttcgttcgccagcgtagcaatcctagaaccaacccgtagcataacccggtagtgactttccagaataatgcctctattaaattcgaatccacccacaaagcaatagaatcaaaatagcctaaatgccagattccaaataatactgacgacactaaataaaccgctgattctcggttaaaaataacagataactgttctcaaacataaccgcggaagatcaactcttcaaaaatcggggtaataatgctgctatagactaaaagaataattgcccgaaatccttccgtgaaatttgatggtgctgttaaaaacaaaagtcagaagactagagttcctacaagataagatcggctgaaattagttggaaaaatactcagatcaatctttatggttctaaaaaagtactagaaagagtcccgtcaaaagaaccatggcgctcatggaaattagtcgatccgagaaatctgttggtggcacaaacagaaagcaaagctgcttgataccaagacttagtaattgaatacttattaaagcagcaattatttttaaaatcgttcttattttcatttattcttcctttatcactatcaaagcagcagcacaacagtaaacgatcaataatcattatgatgagatattcaacctttatccatgttgaatacaactatttcatcctcatattaaaaatcatcattcaattaagattccttcttatgagaacttatcttcaccacgttcgatggattcaaaaattgtaatcggtggtgtaaccatgcatttagagatcacttgagcgatttcctctggggattctttcgcaccatttcttatccagcgtttaacaatcgcaatcgctccatgataaataaattcctgctgtagtttttccaattctgtaaattcatgaggatttaagcgaatttttttctgaacagcggaaatataggcttcttccaatttttcaataaaatgtggacgcccatgctctccaagcaaggtttgagccgtctcttttcgttcgtataagaaattcatcacaaccagacacgcttccttgaaaaatcgctctacgtgcatccgtccataaacatcgattttttctgtcaccgcccaaccaacgtgatcattcagtacctgcgcaaaattggcgtagatctcctcttccacttcttccaaaaccgcatacttgtctggaaaatgatgataaaacgttccgcgattgattttggcttgttttgacagattcgctacagtgattttttcaaagccgatttcatccatcattgaaaagaaagtctcgatgatgtgtaacttcgttctatccgttttattcgacattttttcccccaacaatttgacttgatttgttgattttttgaacactgattcaaaaagtgattaacttttgaacatacctttctttattgttcattgtccaacgccttatttcagcttaaactatgaatcaagaaaaatcaacacagtgttcaattaggaggattcttatgaattatattcaagcagtaaagctaaaaaagaactatcaaacagcgacagcagaaattcccgcgttgatagatctttccttttcgctcgataaaggcgattttacagttattctggggcccagtggttctggtaaaactactttattaaatcttttaggcgggatggatcagcccaccagcggtgaactattcgttcagcaggagccgattcatcgttacatggaaaaagaactatcaaattaccggcggaaaaatgtcggatttatttttcaattttataatctgattcccacgttaacggcattagagaatgtcgctatcgctcaaaaacttgccaaagactcctttcaggcaaaggatatcttggaaaaggttcagctctcccatcgattaacgaactttccgcaagagctttctggaggtgagcagcagcgtgtctcaatcgcgcgtgctgtctgtaaaaatcctcagttgattttgtgcgatgagcccacgggtgcattagatagtgaaacaggaaagcaagtcctgcatttactaaaggaaatggccgtcaagcatggtcacaccattatcgtggtcacccataatgcctcgatcgcacaaattgcagatcgcgtcatccatttaaaggatggcaaaatcattcaaaatactcgtcaagaacatccgctagagattgatgaggtgaagtggtaatggttcgtaaaacctttcgtgatcttcgcaaaaactggatcagctttctctccgtctttttaatgagctttatttgtctattcatttttacgggtattttccatctgagtcagcaaatggacgcaactggaaagcagttctcaaaaaatagtcatttagctgacagtgcattaaccattacaagtttcagcaatccaaaggaacaacaaacgaagaaattgaccaatgtttcgcaagtgacccgcagatcaatcggatactatcaaaacaatcatttttccttatctatcctaaccttcaatcactcttccatcagcaaaccacaggtgattcgcggagcaaagctttcgcagcggactgggatttggttggacgaggactttttccaagcgaataattaccagcttggtgatgatttctcaattgaaaagcagcagtacaaaatattaggaaccattcggcagcctgaatttatctatcacacggagaatgaggaccagccgctaccaaatcataaaaagagcgggtatgcgtatttgtcggaacaaagttttaatcacttgcaaataattcctacccgtcagcttttattgaaaacaactggagacaacaacaccccttggctggaaaatgagctatcagatatttggggaaataattaccagcaattgaaccagacacatgacgggaccggtctttccatcttttttgaccgtgtgactcagattcaacgtttagcttttcttttttcaagtctgtttttattattgacgctaatcactgtagaagcgacaatgcgacggttcgttaaacagcagcaattacaaatcgccgttttgaaggctcagggatttagtcgctggacaattctgtttcattatttatcctttggtgtgatcgtaactttattagggtcaagcatcggctgttgtttgggaccaaagctgctctcgcctgttttattatccgcaattggcaatcaattctctgtccctgactggttagaggtacaaacaactttgggttatgcaggcattgcactgattactttgcttagcatactgattaccttaattcccgttttgccgcttgtaagacagcttccggcgttcattatgcaaaagcagtcaaatcaacgatttaaacgggtttggctggaacaaaccaatgtttggtcttacctgcctttttctctgcaatggacgctgcgagatattcaaagaaatattcgccgggccgtattaggggtttttggtgcactgggctgtatgcttttacttattgccgcttttggaatcaaggactccattaatttctctctagactctgtttttaatgatacttatcactacgaggaaaaagtcagtttcaaaaagcctttgactgttcaagaaagaaaatcgacagttcagtctctctcaaccgattatcaatggctagaaaagcagtcagtaaagctattgaatgattcaaaagaacagaccgtacaagctacgattgtttccaatggcaaccagctgaacttacctgaagttgatttgaaggatttgacgggcaaccaggtttttctttctgaagcattagcaaaaaggctgaatattcaagcaaaagcgacaatttatatcaaattgcagcagcagattattccagtgtttatcaaaagattgatacccatttcatcgccacaaggactatttttttctcaaaaaacctgggaaaatttgcagcagcccttcgaacctcaaagccttttactgccgaagaacaaaacggtgatcgaatcccctttgattaccagcagaaacgaaaagcttcaacaattcaaggactctcaaaagctgattgacggcattcttatgattgtttctttattgattttagcagcattgaccttaggaattacgattatgatgaactgtcatttgctgattttttccgaacgttttattgaatttgctacgctaaaagtgttaggctttacaaaacaggaaatcctttcattgtcgtttttagagacctccttattaacactattgggctggttgttaggtgtccctgccggacggctgtttctcaatgcttatgtagcaatggtttcgactgaccagcagcagtacttgccgcatattacatttcaaagtatgatgattgctagtcttgtcttatttatctgtatgttgttggttcaactgtatttaaatcgccgaatcaatcgaatcgattttgctaccgctttgaaaccagccgaataaaaaaatctcctagcgtatcattttacgctaggagatttttattttattcagcttttgaacggcgtacatagttttggtaaaggataataccaactacagtaaatccaactggacctgcgatcatccataatgtatcgcgagcgccagcaccttcgatgattggttggaaaatcgtgaagacattcgcacccaatactaataagaagacgacaacactgatgatcattgtcatgctcttagacttgtacacttcaaacggacgatccaaaccttgtttttgcttgaatttagggaacgcataaatcaagaacaagtaaggcaatgtcattgaaacgttcgccatcaatgtcaaaatattgtagaatgctgatggatctggtgtagcgaatgaagcgatcaaaataatcgcaacaacgatcgcacattgaacccacatagcaaagcttggcattccattttcattcaattcagtaaatttcttaggccataattttttcggtgttcccataatcaacgtcttcaatggtgaatacgtcaatgtaaagaacgcaccgctatatgctaagaacatacctagaccagtataacgagcaaaccaattacccatactgatggcagcgccgtgtcctagacccatcgcatcacctaaaacgtaacctaagttattcatcattacataagaaatatttcctaagttggttgaatcaccagataaaacatcttgccaattggtacttacaccccataagaagatccctaatgcataaccaacagagatgatcaatgcagaaagtacgacacctttagggaaagttttttcagggttcttagttttatcaaccatgcccccaacagcttccaaaccaccataagcaaagattgcgaataccgcgaatcctaacaagccgattgggctttgatagctaggatttggtgaatgtaaaatgtggttaaatggttgcgctaaatgccccccatttaataccaaaataataccagaaattacgattaaaacaacgtttaaacttgttaccgcaatcccacctaagctagtgattttaacgattcccttgacccctttaattgagaccaacgttacgatgatcatccaaacacatgccagcaaaccaactacttgagtcgagttcatacccaacatatgtaatttttgcgtttgatcgctcccagcaaatgctgtggtaaaaggaatccaaactttagatgatgtagaaaccatccagacaacgtaagaagcaaaccacataaacgttccgataaatgcaaaacgtggtcctacgctgacctccagccatttgtacatcccactattttcgcctttgatcgttgaaccgaattccgccatcatcaatgcaaatggaataaaaaatagaattgctgcgataacgtaaaagacgattgatccatagcccattaagtaaaaggctactggtccgttagcaaacccaaataccgaggtaaagatcatcatgactaacgcaaccaatgtcatgcctttctctgatttggccattgaaaccactcctattcaatttttctagggtctttattacgtttgtgtttcaatcttgaaattagttattaattgaacaagaacactgtaaatataagaaatccctaaatgatactttacaatgaaaaaagacagagtgcaagaatggtgaaagtcattgaatattctgacaaattgcatcaaaacaattacgaaagctgaaaatctacgcaacaaattaaatgataaaataactagattaagaacaattgaaatgagtgattttaacttgtttttttattgtattttacttttccttctaaagcacgttatatcaaacttaatatcaatattcaaaaattagaaagcgctacctattgatctgtaaatttttatttaaaattaaaaaaatacagctaaaggtttgtgtactctcttctgaatctttatttaaatgaggattaattttgaaaggattattttcatcgtctttttatgataattagatttgaattattttatctaaataccattttatactcagcgttaatccgtctaaacctaaagatactttaattttaaatccgcatttctatttcgataatttatttatgtaaacttttatccataaaaaaagaaccttgcgttaaggttctttctttacctttataatcagtcatttaacttcttccaaaaattatttcggttgattaatagccatgccacggacaggatcgccaaccaaatcatgacaccgccatttagcaacacaggattaacattcatcatgacagcgactacatataaaacgatcagaatcgcaccaacaaaaagcgagccaaacatccaaatcatcagaccatagtttcccacccctcgtgtgaaaagttggctgatattggtccatgtcacattcaacaaacgataatctcggctaaaaaagtgaagtgataacagatatgttccccataatatccctgctataaaaggcagtgataagaatatcggaaaccgcaacacaacagctatcaatatacctactccgccagcaatcagcatctggattttacagccaacccagaatttttgacgaagatatttctctagcgacaacggaagagattgaataaaagaaaaattctcacgatccaatgagatcagattactgacaaaagaggtttgattaagcataatcgtcgcaaaaacaatccccgccacaaagaatacccccataaactttggcgttaaggtttgtaaattgatcggactcgtagttactattgtcccaatcatcacaattggcataattaatgatgaggtcaagacctgcataatcaagttaggatttttcagtaattgacgattgtagcttgccaacagctgcttcaacgattgatcggtttttcgtttgcgttttgttgccgcagtatgggaagcctcatcgctgaattgttcgtataagctaggaattacgaaaaatttcaatgccagcaaaagtaatcccgtcacagccaacaatacaagcaaagtaataagtccagttaccgaaaacagctcgtgcataacccggtagaacggtagaaaaaccgaaaacgcatgtctatcggctatacccgtgctggaatgatcgacagaattttgggtgaaattgattgctaaaaccccgccaacagaaacaatcatggaaaagcccagcattaagctggtaaacagctttttatgtcgccgaaacagctttgtttttgtcattccaaaaacaattaagctacatagactaaataataatgtaaagaaaataatgaatagcagaatagctcccactaccgcgattacgatggaatagccgcttttataggacgtcaggaaaaataaaattaacaacggcaatagaaacggtacaattgtcatcccaactgccaaaaacttggcgacaaagacctccccttgcttgattggcaaaggcaaataatcctgcaaatctttactttcaaaaaagacattaaaaatcgctgaaagtgattgggagaaaccaatcaaagcaaatagcatcatataataagtaaaaaagccaggcaattttgaaaaatcaatcatcaccatagttgctccataaatcaacagaaagattaccccagacattaaatactgttgaacgatactacgaatgactttcttgcccttatgccctttttttcgaatttgattggtggaagatggattgacatacagcatgttgactgcaatcaagcgtttgatgatttgactattcatgggcaggctcctcaatttcagtaatcaagtccccatcagcttggcgtccagccattttgaggtagactctttctagcgattcatttggataatcctgcaataaattgtccacggaaccgttatagatcagctcaccttttttcaaaattgccagttcatcacacaattgctgtgcagtgtctaagacatgcgtcgaaaaaatcactgtattgcccttttcggcatggcgtttaatcatttccttcaaatcaaatgcagcctgcggatctaagccctgcaacggttcatctaagatccaaatatcgggatctggcagtaaggctccaataatgatcgttttttgccgcatgccatgagaaaagctttccaatgtttcatcttcgtgaccaactaaatcaaataaattgatcagctcttgtcggcgatgctcctgccccttcagatcataagcagctgagattaaatcccaatactcattggctgttaattgtaaaaacatatctggcgaatccggtacatacgcgatcttcttcttaattgctaatcgatccgtcttcaaattctttccatcaaacaaaatctcaccactcgtaggctcaataatactcactaaacttttgatcgttgtcgattttcctgccccattatggcctaaaaagccgaaaatctcaccggccttaatcgttaaacttaaattatctaacgcttttttctgatcatatatttttgttacaccttttaattcaatcattttgtcgcccccttattcattcactatacgagaaaagcttcgccatgacaataaacgaaaagaaaaaaacactcaaaagagtgctttaagctgcgacctaatatctttaaaaaatagatacatctatgcgtaatttaacgcaaaaaaatctgagaagctaattttaaaacacccaagttcatttgagtcacgttactatgaaggacatgaaatctaaaggtgaacaaccgttacttgattttcatgctctttaacaatcgcgactaaatcctctgtttttaaccatacagttgctgtattatcgttcggatgaacaccaataagtcctggttcttcaaagaaatcagcatcaataaagaagtgtactttgtgttctgaatcatttaaaattccaaaagggctcaccgcgcctggaattaatcccatcacttccattaaatcattctccgatgaaaaagataatcgtcgcgtgttgttttcctttttgaattctttaagatcgacccttttgtcgcctttaacagtaattagataaaaatttctttttttatcatcacggacaaaaagattcttcgcatcagcttctgggtatggcaacgcaacctcggaaagttcctccatgttgtatacagcctgatgttctgtcacttcaaaccaaatatcctttttgctaagataatccaaaatctcatttttattcacaatgcttcctcctaacgatcagttatgaatagttaaagtatatcacatccaaatacagataaaaaatgaatatttataaatacagttttaattagaccctttagtcttttaatggaatccaaagctcaataattgaactgcttcgattccaatgaaatctttcgtcatatttttcaaaatgtaaaaagttcgtttgttccaagttcaaaccaagcttgggaatcagcttctggtaaatctcttcatatgtagcgtagatttggtccatcgcaccttgatgctccacaaccaaatatttccccgcaggaatatccttcaaaatgaattttgttggattcgccttcatttttgggatcgcacaataataataaagctgcccatctcgccgttccataaacgcatacttagtccaatttccagtttgttggtttaatccattgcttttaagctgataattaaaacgcggccaaaatgatagactgcgttcaagattcttgcttttttgatttgtcagcgccagttctagtccagtaacagaaaaggacgctaattcttttagcttatacttgatcatatcacgacaatcctttaatcgttttcaattagtttaactgaaagatccgagaaaagaaatcgcgaaaagtaaaaatagatcttaaagcgcctttcaaacttgattcatagtaaaatattaagtgaagaccattatagaaaaaaagggtgatgaaatggtaggaaaagtggaaaagctgcaccgcgaaatactcgattattatggtttattggagcatgaatcgatttgtgaaattcggcattttggtacgggagaagaaatatatagtcaaggtgtggaatacaagcatctgacgatcgtagtttcaggaaaagccaaagtttgcgtcagtgctccgaatggcaaagacttgattttagctcattatctttctagagggttgatcggacacgcagaattaatgactgggatgaagtatgcgaccgcctccgtcatgacgctctcgccttttgaatgtatcctgatcccttttcagagtaaacaggacaatctctttaaaaatctgaccttcatgacgagaatgaccgaggatttagcgttgaatatgatccgagattcctacaactttacttcgaacgttttatttagcggcgagcagcgactatgctcctatattgctcaaggggcttataaggattttttctttgatcgtttaacagatgtcgccgcgacggtgggaatcagttatcggcatttaatgcgtttattaaaaaaattagctgaggataacattttaaaaaaggaaaatggcggctttcagattattgatatgacgcaattgaaagctcgctcggctgaaggtatacaggctaggtagtgttaactagcctgcttccatttgcaatcagctttagagtcagtattttcttgttgctgcattttgatggcagtcgctaagatttgttctttccgttgtgcttcaagttcattgatatgtgcccaatagtttacttttgctcgggctttttgttgctttctaacagccataagcccagcagcaataagaatcaatagtataagaattatcattttcagcacctcctatacccttattttatggcttttggcggaaaccaattaggacatatgtcacattttgcaggattttttaaacttgatggaaatctttttttaaaatcagaagaatcatgcatacgattctgctgaagagtctgttcactatattcaagaaaatcaataattagagctcaagcctaacaaactgggaaaagcagacctcgcaaaaaactgcctaacaacagctaggcagtttgagattatttatataacggttctttggttagctcgtggtcactgatccaaagaacgagttcgtccgcaagctcttctgtcatcggaaacgatgcttcgatctgttcttttgagatatgatccacatgtacgcccgctgtaatgacacaatttcccggaattattgattgaatccttcccaataatatcttcgccagaacatcatctttgtgaaatcggccatcatgactgggaaaacgctgaagctgtgtatctcctgaaaaagtcgttaccgtaccgatatgcggcgtatcaccgccataaagacacagcagcagatcattcccaatccattcggctttaagtgtgatttcgtagtcggcttttttgatagtaaagagtttactcactgtctttccaccgcctcgaaacgtggttttcgatgcctaaagcgtccatcagcttcattgattgatgggccacgagatcatcgattgtttttggctggctgtaaaatgctgggattggcgggatgatttgaactcctaatcgggctaatttggtcaggttttcaagatagatcgcattcagcggtgtttctcgcggcactatgaccaattttctttgttccttcaacgtcacgtcagcagctcgcgagatcaagttatcgccaaaccccatcgaaatacctgcgacagttttcatactggctggcacgatcaccattccatccgttaaaaaggagccactggcgaccgcagcacctaaatcacgattgctataatgataatccagcatctcttcaaattctttcaagctaacatcggattccaacttcagattttgctttgcccaatcactaataatcccatgcgtctcgatcgttggatcagcttttagacgtttgatcaaatcaatggcgtagataatgccagatgcaccggtaactccaatcacgattctttttttcatctgcttcacctactccaaatattttttccaatccgtgacttttttgaattccgcccgaataaaatcattcttcaaatcaaatggcaccgtaccgtccaagatcgttttactgctcataccgcggaaacgaatcgacgccggattatactctggccgttctgaaggatctaacggatgattgcgcattcccggcagcacgataatgtccttgtcaccttggaaacgagtattcaaagtccacatcacatcgttcatgtcgaaaatatcgacatcgtcatcaaccaaaatgacggtttttaattctttaaaagctgaaagagctaaaatcgccgcttggcgttggattccttcatcggcttctgtttctttatggatctgtaaaatcgacattagcttgcctccgcctgctggaggattatagacgttcgttactttcccgggaatcgccttgtcaactaaatccaaaatactggcttcagtaggaattcccgccatcgatacatgttcttcggatggtccaatcgtcgtctgcatgattggtcgatctttgcgatgcgtgatcgctttgactttcacgacattgacagcaggattagcatcgccgttataaccaggaaattccggcatcgccttgccagtattcgtattgatatcctcttggatcgtttcgtgaggtaaaatctctgcttcgataataaattccgaacgggcgatcccaacttcatccactgcaacgccatccactaactgaacaggctcctgacgcaatgcgccagcgatccacaattcgttgtagcccagcggtgtggttggcggctcgaaggtcgtgccgatggagattgctggatctaatccaatattgatcgtgatcggcatcggcttgttcaatgcttcatactgtttttgaaaatgtccgatgtgacggccgccgggcatgatatacatcccgatcgtgtcttcatcctccaacaccatccgatgaatcgtaacatcgctcatacttttatccggatcagagccaaaaacaacgcccattgtaatatagggtccagcatcatattctgtattggtgggtgctgctaaaattttgcgaatgtcaaagccttcatcactggctaaatgtacaacttcttgagccggtgcttcagctttggtcacttttactggcttaactggattttgaacagaatccttcaacaaacgccctagatgtttcggatcgtgatgcaggatcttaccgacacggtcgcggctggcgataatgccgatcaacactcgggtatctgggaaccccttgacattgttgaacatcatagttggtccttcttgcgtcgggcgtttgaccgtgccgcccgctccgatataacgataaaccccggaaagctctgcatgaggattgacctctacattcgtttcgtgatactctcctggcatttcctgtaattcagctaaaacctttcgtaaatcataaggtgtcgacataaaaaaagcctccttgtattgtttgattcaataagctaagtttaggctcatcaaagacacaatacaattcagctttttggttttattattccacattggaatatttatcttgcaaatactttaaaaataatttaggtgccggagcatcggcttcttctgagagataaaaatacaggtaactttcctgcgtcggtgcgatttcgcgtagaactaattgatctgacagcgaattacctaatgatttttccatgattaaggagatgcccaatccttgctcgatcattttcaaaatcaaatcgatccgggttccctgataagtaacttgcggttcaaacccgacgctgtgacacaactccatcaccgaataataagctttagatgcttggcccagcagcaaaaagttttcagcctgcaaatcagaaagagtgattgtcgaattttttgctaaagggtgtgctttcggcaagaccgccacaaaatgatcctcttctgttgtgatgtagttctgagcatttaatttatctaatgaacgaaagaaatacacactattcttttcttccagcgggatacgatccatcgccattgcttcagattcctgcaagttcaagtgaacctcgggatgctgccgcaaaaagctcgttaatagatcaaagcccaaatagttcggcatcgtcggaattgtgtgaattgttaagacccgctcctttttctctcgatgtttagttaaattcgcttctaaaatctgataatcagtcacgatccttttgacatcctccaagatcaattgtccgtcttctgtcagcttaatctggcgattgctgcgatcaaaaagctggattcccagttccttttccaatgcgttgatcttttttgagacattgccctgtgtcataaaattgcgctctgctgtttccgtatagttcaaggtctcagttaaatcaagaaagagcgttaatttttgctgatccatttcgtcaccccattccattcaggaatattttaacgcagacaatcgcctaagccaaatggctgggcaaaaggattattttttgagcgatagagcctttgccaccatctgatgataataaaccttcatcgcctcttcagtaactttctggtcaatatctgtaacagcgatccatctcacatcactgttttcatcttctttgattttgaaggtttgatcttcctgcgccataaaaagataagtcgtattaatatgattatgttccttaatatactgaccatttttataatgcgccggaactggtaagatattaaaggcgaacaagccatcatgcagtaaatgatactccttgattccagtctcctcttctaattccttttgagctaccaacaacagatttgcgcagccatccgcatgtccgcctgtccaagaataagattgataaatattatgatagaccatcaataccttgtcataagtcgaattaactacccaagctgaagaggaaaaatgatagtctggattttcccgcgtcaacaactgctcttgaaattgcagtttttccataaacagctttttgtccgctgcttcttcctctgtatacggttcatatgctttgattgtctcaatgatttctttcattttcctcttccttccatagtcattcaactaattataacaagtaaaaagctgtgactacaattagccacagccctttattacattctattttggtcgaaccggcaaccaaacctgaaattgcgcattttctggattggcatccaaatacaattcaatatccggcaactcatcgtattcgaacccagaagttggcagccattcttgaaatacttgctgctgcaactcttgaatcgctcctggcattggcccggtccctgagaaaacagcccattttgcggccggaatttcatattgcgcgaattcctcggtcgcttcttcattgacaacgccaatcacatattcccaagcgtcctgaacctctgaggtcatcaagctaacacctaaaactcctggcgtttcttgatccatcagcggcagcagcttttgcagatctccgctggcactgacttcattccaaaattccggaatacgcttttgcgctacctccatgtcctgctcgattttcaaaccaaatccagtcacatgaaaagcttctttgtcgattagttgatactccattgcttgcacaccctttacagtcaatttgaaggtcaacattggatagctagtcaattttacgcctgattgcttggcttccttaggtgtgattccgtgcacgcctttaaacacacgattaaaggaagttggagaatcgtagccatatttcgcagcaacatcaatgaccttttcacctcgctgcaaatctactcctgccagactcatcctccggcggcgaatgtattctcccaacgttacaccagcaatataagaaaacatccgctgatagtgatagctggagcattgagctaattgtgctgcactgtccaagttgatctcagcagctaaattctcctccacataagcaatactattattgaaatgatctaaccattccatccatcttcctcctgtttctactatagtctgaccagtaaaggaatacctcttagaacgtgcccgcttttgcgagctaaaagtttaatttttctaagcgatcaaaggcttcggctaaaacttccaacgactgagttgcggccaatcggatataattgtcgccaacggtttctccaaaggcttttcccggtacgaagagcacaccgcttttttccaagacctgttcaacgaacgtcactgaatctaggccgcttttactgatattaataaaagcatacatgcttccagcaacagaaggcaaggataaataaggaatttcagcaacccttttttcaatataagccaaacgttccttgaacacttcaacggttggcggtacgagttcctcataatgtttcaacgcatagattgcaccgcgctgtgaagctgttggtgcagaatacgtaatactctcattgatcattccagcaatttgattgatgtaagctggcgcgatcatatagcctaagcgccaacccgtcatcgcaaagcccttcgatacaccgctgatagtgatggtgttttctggagccagacgagccatgggtacgaatttttctttgaaagcaaaatcctcgtagatttcatctgaaataataaagagctccttttcaatcgcaacttcagcgatttgttttaaggtattctctgaaaaaaccgctcccgttggattgtttggtgaattaataataatcgccttggtccgatcagtgatagccgcttttaagtcctcaacgtctaactgaaagccattttcttcataggtaggaacaaaaacaggtttacctcctgataatacaacctgttcacgataaggtgaaaaatagggttcatgaataatcacttcatcaccaggatcaaggagcacctgcatgactaaatacatggcatgcaatgcgccaacagtcgcccgaacttgattgagttggacgtgcaacccgtattttttttgataaaaatcaacgaccgtcatcagaaattctttgctgccatctggtgctgtgtagttggttgccccctttttcacgtcggcataagctgcttcgataattgccggatcagtaatcaaatccggatcgccaattgacaaatcaataatattttccttttctttagctaaaacggcgatcttcatcagcaaattttctgccggctgctggaagcgtcgcgcgagtttacttttgtccatcctgtgtcctccgcttctgtttacaatactttatttaagaaatcttgtgtccgactgttttgcgggcgctcaaagatctcctcaggggtaccctcttcttgaatgatgccgtctgccatgaagatcacacgatccgccacttccttggcaaagcccatttcatgagttaccactaccatggtcatgccttttttagccaaatcctgcataactgacagcacctctccgaccatttccggatcaagcgctgaagttggttcatcaaagagcatcacatcaggactcatcgccaatgcacgagcgatcgccacccgctgctgctgcccgccagataaactagcaggataactagtagccttttccttcaaaccaacttgatctaacaaggctaaagcttgttctttggctttttcagggtcttctttttttatttttactggtgtaatcgttaaattttctaacacactcatatggggaaagagattaaagctttggaacaccatccccattttctgacgaatctgatcaatattactgtctggagccgtaatattttgcccttcaaaaaagatttcaccagaagtcggctcctccagcaagttcaaacaacgcaggatcgtactcttcccgcttcctgaaggcccgatgatgaccaccacttcgccttctttgaccgtcagatcaatcgactttaatacctcgttatcgccaaagctttttgacagttgctttacattaatcattcagacccattctcctttcagcaaaacctaatagacgagaagtgcagaaggtcagtacaaaataaatcagcgagaccagcacatatggcaggaatggcttgaagctggcaccttgtactacacctgtttggaagatcagctccgacactccgataacggaaacgacagaggattccttgatgatcgtaacgaactcatttcccaatgctggcaaaatattcttaatcgcctgcgggaagatgatgaagcgcatcgcttctttttgattcattcctaaagaacgtgctgcctccatctgtcctttattgaccgcattgatcccagctcggacaatctcagcaacataagccgcgctattcaaagatacagcgatacaaccagctagtaatttcgacaaatctaagcctaaaacaccagtaccgaagtacacgataaaaatttgaaccaatagcggggtgccgcggacgtactcgatgtaaaccactgcaagagcctttaaaagcttgctcttgcttagcttcatcaacgccagcaagctaccaaaaatcaaaccgaacaagacacctacaaaagctaataagatcgtatatttcgcgccatttagataataagggccatacttttgcaggaaggattgctcatcttggaacatcaattcattggcttccttttgatagcccttcaacagatccttgtcattgattgttttgatggattcgttgacatgctttttcaattctggtgtatttttcgacatcgcaatggcagtgaccttttcaccctgttcaaacttgacaggagctaaagctacgttgtcgctttgctggacataagcctccgcgacaggctgctccagcactaccgcttcgacttttttattcaataaattattgatcaagtcaggaaccttctgaagtgaagtcggttcggcaccagtcatttcatttttcactagatcttcttgcgtcgtttgtttttgtgcaccgactgctaaaccatcaaaatcagcagtcgttttaaatttattcttgtcatctttacgaaccagtactttttgttgtacgacaaagtacggatcagaaaaatctacttcttttaggcgttcctcagtaatagacataccagaaataactaaatcgatcttgccggttttcaatgctcctaatagtgcatcaaaaccaagctcttcaatttttaattttacgcccatatcctttgcgattttttctgcaatcgagacatcaaaaccaacaattttatccttgccatccacatccgcatggaactcatagggtgcataatctgcggataatccaacaactaactccccgctttgttgaattcgttcatagatttcatccttctctgctccttgtgcttttgccggtaataaattcagcagcattaatagcactgtgagtaatgctccaactttctttttcatccatttcgctccttttgaataataatataagtatatgaataataagagaataaatattcaaaaataacttgctctcatactaccataactattataataaaaaaagattaatctaaaaaaatgatgaaagaagtttttctatgacaaaacaattgatcgtgcgaggcgccccgcaagaatatgaactgaaagaaaatgcttgggattcacttgaatctcatctcaatagtagaaacattgagaatgtcttgattctccacggcaaagtatcctggcaggctgtaaaagactatttcccagatttatcaataacaaaaactttccaatattatggcggacaatgtactgattcagctgctgaggattttgcgtctttatgcaaaaaggaacaatttgacgggattatcgctgttggtggtggaaaggtcgccgatctaggcaaattcgtggcatataaggtgaatctgccgattattattttgccaaccctagccgcaacctgtgctgcctataccccgttaagtgtggtctataatgaagaaggtgtgatgctgcgctacgatatttttcctaaagccagcgatctagtattgattgatccagagattatcttactctctccccgtgaattgatgatcgccggtattggggatacgttagcgaaatggtatgaatcccatacgattatttcacaattaacaatcaaacctgttgaagtccaagtggctgagtttgcggcgcagaaatgtcgtgaaattcttttaacaaagagcatggaggcattagcagcgatggatcagaagcgactcaatcaagcttttgtcgatgtagttgaagccaatattttattagctggaatggtgggtggttttggtgatgaatatggacgaacagctggtgcccattcgattcatgatgcactgacggtactaccggacagtcatcagcagcttcacggaaacaaagtcgcctatggcattctagtacagctgatgattgaaaataatctaacggagattgaacgtttgcttcctttttatcgtcaattagctcttccgacaagcttaaccgatatgcacctacaattaaccgagaaggactatcaagctgtagctgaacgggccagcactcctggcgaaatgattcatctaatgaaagaaacaatcacaccagaacgaattatttgcaaaatgaaagaattagagacgttaaccagcagctaaataaaatctactgcaagttaaaacatcgatcaaagcatagacaaaaaagacattctaaacgactcgtctggtcggttagaatgtcttttatcaatacttgccgaaatatccttattaaaatatctttcccgttcgtatagcataaatagttaaggaaatcaggatgaacaacgccaacatctctagtagaaagtcggtggtttttacttcgtttttcgaagtgttcttctctcgtttcattgcgctattaggggcctccttatttttacaatgcaaggatagcaaaccattggtataggcgcgtaacaattcataatgaatttcattagaatatcattaacgaaacctaatccgattcgactttattttcgaacaattttccttttgcgtttctgaaaatcaacgttacgcttagtagttcaattatttgcatcagcggtacccctgcacctgtgtagaaaaacataaataagcctcttccgccgggtgcccaggtcgcaaaccatgaaacgccaaagagatacacggtataggtcaacaataaaccaaggaaaataatcaaataatccgctaaaaccggccgatttcttttctttttaaaataagcaattgtgaacaacaagatagcgcctaagctcgcaagcaatagtattggtgaaataatccgataaatccagataatcccgtttatcacaaatacaaacggttttgttcgccgctcctctgcctccattccctcttttaaagtagaaatagatttgacattaattaagtctagaacaacttcagctggttgattttctacaaagattgatccgccatagctcgtttgatagcttcgataaaatgtggtttcaataacacctaccccaatatagttacatacctttcccatatcttcaagctttttcccattgctttgtttcgagacaaagaacatatttttcctatttaacttgcctgactcaaaaccctcttccagctcctgggagatttttttaaagactttttcatttgctttgccgtccttgtagagaccttctcgctgaaacatttcacgtaagccccaaacaaacatatcaccaggcagctcaccattttttactggccaagaatgcggccaaattgattcactatagatccaattgattccctttttgtatttggcaaatgttggggacactttttgtgccttatcaaacgtcttttttgacacccaaattccactgtcttcagcaaccacttcagaatcaaagctgctattgtcaatttgaatcagattttctgtcattctggcaaatgaggtctttgtccgatcattggtggtaaagattccataatgctcataattaatttttgaaatgaccaaagattcgcctgcggttaacagcacaggtgctagtaaaagtaggatattcccaattaatctcgttttactcgtttctttaagcagtatccaaaaatttctaaagccctctttgaatgaagagccaagcgaggaatgctttacagtaattccaaataacgtacaaacggtcgcgacagcatataagggcactagccaaatagaatcctcacgcaaaaaccaaaagaaaggaaaagtcgccatcagtatgacggcccatgggagacgttttctgagtgcttcttttcttcgtaagaaatgaccaagtattccggctaatacgaacaacacaaccgcaaaaaccaaactatttcgataaacccttaatgaaaaatctgaggtaaatgtagccggtgaatagctgaaaaatagaaagcccagtccgcttaagtatcgattcttgatcaacggcgccaatgccttcacaatcgcaaaggccgctgccatattcactaaacacaaaaacagcggataagacaattttgaaaaatgattcacaataaggaagaaagtaaaagataatcctttagtcaaagtccccgtgccataaggacctaaccattttcccgctaaaatagttaatgcttgattgatagaaagtgcatcgtcataccctgcctgcatataaattttgactggcatttccacggctaacacaacacgcacgattatagcaacaataatgagaaaggcaaatagtcttccttttgctagtgtattcagtgtgaattggttctttctgctcataatttagagaaagggataaaaggcggcatctccccttttacctccgttaaaaatttttgcagccaaatgacatccagccattgatcaaatttataccctattttagggaaattagccacttgctggtagccaagcttcttatgaaaatcgatactggcttgattgccgccagtaatacacgctgttaaaatcgcgacattctgctttttcaaggtttgttctaatgagcggtacaaaagctttcccgctccgttaccgcgtttttgccgatcaacatagacacttacctctactgcccaatcataggcagcgcgttctttatacgcatgggcataagcgtagcctaagattacgccattgtcttcggctacaaagtacggatatgtagtcaccgtttccgctattcgctgggcaaaatcttcttcactggggacagcataatcaaatgtgatcgttgtttccttcacgtagggcgcataaattgctgctactgctgttgcgtctgctggtgttgctactcgaatttcaatcatcctagacctcctcgctggttcaattctatcactctgataaataaaaaaacaacctctctataaaaattaccgctagacaggtattatccttcctgtttctgtagtaacttgcgcctatatgaatcatttacttcattcgagcatcatacaaaactgttaacaataacatagctagtttctctagtaatggcaatttgttctaccagactgttttccgccgtatttatcttcgatttagattaaaaataaatgtcgattctttaatcttttaaccgttagttttattccctcctaatggttattttcaactgagtatgcttagatagaagaagtgtgtctcaaaaaattcaatttcagctttccactttcttgaaacgtttagcgaaaatatttttattgagataaaaaacatgaatctaaaatagaggtaaatttatggaacagaatcaaccacctgataagcatacgaaagaattaagtttattgggcttaagtatgatcgttatcggttcaatgcttggcggcggcgtcttcaatctacctagcagtatttcacaatccgctggcgttgttgcatctttgctcgcatggctgattaccggtgtcggtgttttcttcatcgctaaggtttttcagacactttcaaaggaagaacctgaaattatcggcggaatctactattacgccaaagacggatttggcgattatattggctttaactccgcttggggctattggctaagcaatattatcggaaatgtttcctttgtcattttatttttagatgcgttaagcaaattcatcccctccatcggcggctctggtggacaaatcggattgcttttaggaaccttcatgatttggggtgtaatctttttagtcgctcgcggaattcggactgccagcattttgaatacgatcgctaccagtgcaaaagtcattccgattttaatggcgatttttcttttgttcgttcattttaagtatcaaaccttttcaatcgatgtcttcgctaaaaatatgatgttgaacggtaaacaattaggctctgtccctactcaagttcgacatgcgatgctgcaaactatgtgggttttcgttgggatcgaaggcgcggtagtattatctgggcgagcaaaacgtgcacgggatgtcgggcgagcaaccttgattgggtatgcaacaaccttagcaatctacgtattaatcgtaatgctaagttttggatcattaccgcaggagcaattggctaatcttccaagtccctctttaagcggtgtccttcgagcctcttctggtgcttgggcagctagtatgattgatattggtgtcattatttccgttttaggcgcatggatttcttggacaattttggctgcagagatttcctttgatgcagcacaggacaaaatgttcccagctttccttggaaaagccaacaaacaaaatgcgccagttaacgccttagtattaaatggtgttatcatgcagatcgtcttcatgatctctcgttgggcaatggatgccttccaggctgtgacagatacagccacaacgatggtactcgtcccttacgtcttgtctgctgctttcttatggcaaattgccaaaggaaaaaaacataaagggcagcaatttctagccattggcgggatcatttacggaatttatatgctgtattcctcaggagcgctaaacctgctttactgtattggcatttacgcattgggcatggtcttttggctgtggaacagccatacctatcatcgaccagtttttaccaccaaacgagataagctgctttttgcaatcgtgacagggttaggtctgattagtttaatcgtttttctgattcaattaggataaaaataaaccggtgatttcggatcaccggttttttcttctatacaaactgtaaaatcatcgttactaatagtcccaacgcgtaacagctattaaatacgatcagattttccaccgccatcggaaatgttttgtacttgatttgttccttagtaaaaatttgagtttgtggtactactttaaacagactgataaatatcagtagaatcggccattgataaataccaatgatcaaaccaacaaggattgctccgtagcagctgtacatcaaaatattgaacagcctcacactccactctcgcccaatataaaagggcaatgtataccgatgattttcgatatcctgcgctagatcactgatattatttgccagcatgatattggcgattgtcaagattagcggtaatgctgcccaaatcactgccagtaccgccatagtattgccagtgatcgcaaaatgattgaaatccagttccatgtaaaaaaggcgttgatcataggtatttagataaatcgtaatagcaaaaattcccaacccttcagtaactccgctaaaaatctcacctaaaggcatgcgcgaaagcgggatcggaccatacgtataaaacacgccgacaaaaaaacatgctgctcccattggcaacagcatccagccagtttgaacgactaagatcaatccaacaattgccgcaaaacccactagtcctataatcaaacgctgtatctgtttttccgacaaattttctcgtccaatcagattttcttcatatttgtaaatctccgaatgagcttttttaaaatccatatagttattgattgcagtgattgccaagtcaaacgcaaacatcccgaaaaagaaaaaaagagtctttcccggatggaaggaatgaaaatacgtgttagtaaataaaatagcaatcacaaaaggaaagattccggcaaactttgtacgaatttgcacaagttcaaagaaatgttctttggtcattttttgctgcgtagcttttagcttcttcgtattatccataaataatccctcgttcattattttttcaacaagcaaacccacctcataattataggggcgggacatccgatttatcagataagctgccacaacaatgtgaccaatagtcctaatgcatagctgccattaaaggcgactaaatttttaatcgacattgcaaaggtcttgtgtttaatttgctctttagtaaacgctttggtttgtggatagacctttagcaaactcaagaacgttatcagaatcggccattgatagatacccgtgattagaccgatcacgatcgccagataagaaccatacattaagagattaaacaagatcaccgcattctttttgcctaaataaaaaggtaatgtatagcgatgattttcaatatcctgttccagatcacaaagattgttcgccaacataatgtttgcgattgtggctattaatggaattgacgcccagacaaccgccaacgccgccgttgtactcccagtaatcgcaaaatgttgcaaatccagctccatgaaaaaaagcttcttatcatacgtgttcaaataaaccgtgatagcaaagattcccagccccatcgtcacaccgctaaagacttcgcccagcggcatgcgagacaatgggatcggaccaaaggtataaaagactccgataaaacagcaggcacagcccatcaccagcaacagccagccagtttgaatcgctaatgtgatcccaacaatggccgaaaacccaatcaatccaaaaataatcattacaaccgttcgctccgaaagttgagcttttccgataatattttcttgatatttatactcttctgaatgggctttgcggaaatccatatagttattaatcgccgtcgtcgccatatcaaaagcaatcatgccaaagaagaaacagagcgtctttccccaatgaaacgaatggaaatacgtattcgtaaacagcacagcaattaaaaaaggaaagaagcttgccaatttcgttcgaatttctactagatcaaaaaaaatctttcttgtcatattatttcagatccttatcattgcccattttatagccagcctctttatttaattcaaaaatatccttcaatccagctgtgacataaaccttatcgtctcgcgtaacaaagatcgcttctgtatcctttaagccctctacatatttcaggccttctttgacccccatcgaaaagaccgcagtagataagccatcgccatcgattgattttttcgaaacaatagttacaccggcgatatcgttgtcaaaaggatagccagtctttggattgaacaaatgatgataagttttcccatccgcctctagatagcgttcatatatcccagatgttaccagtgacatattactttctggcacacttcctaatacaacattccgtgcttgattcggatcttgaattccgactgtccaatcttctttttgatttccccgcggactatgacccataacataaacattgcctccaagatcaataatcgccgtcgttacgtcgttttctttcaaaaccttgacgacttcatcagtgatatagccttttgcaattgcccctaagtctaatttcatacctttttctttcaaaaagacagtcttattctcatcgttgaattcgacctcatgataattaaccaacttcaaggcttgatcaatctcattttgagccggcttacgcgcatcagggaaaccaatccgccacatcgatgtaatcggaccaattgccatgtcgaatccgccttttgaatcttggctatatttataagcttcctttaatagaaagaacatgtcatctgttactttgactggctttaccccagcctctttattgactgcgtcaatctctgacccctcttgattaaccgtaatcttatctgccagctccttcactcgcttgaaagccggtttcagagcagcttcctttccatcatcataaatacgcatttggacatatgtacccattaaaaattgcttatcctcatatggcttttcatttatttttggtttgttgctgccgcaagctgtcagcagaaccatcaataacccgaaaaccatgatcactattcttttcttcacttcgctacttcctttgtattcaaaattttatcaccttatcatagcgtgtttgagacaaattttctatgttgatttatttaaaaacagctaaattcctgattactatcgattatttatgaataactgcgaaaagttggactgaaagctacctcatttgaatgaaatcatttttccaaacccttgaaaaatgagtcggattttcggcacgcatactattttgctaaacagttcaaccgtttttttactatcctctgttaacctgaccttgattcacataaactgccaaaaacaaaactagcaaaaaagagctggggaaaccccagctcttctaagattccctaaaataaaggaattattatttagtgacgatgttatcaacttgaattgcagttgtgtcgcctttttcagctgcgtttactaattgtgcagcgtatgtttggaatgcgtgtgaagaatgtgtcgcgcctgttaccacttcaacgtctgcaggagcacctttttcaactaaacctttgtttaattgttcgatatattcttttggaccaacaccgcttttagctttcatattcttttcgtagtccgcatcatcttttttagatttgccgtctttgtctaccatatcaaagttagattcagtaatttttccgccagctacagtcatgctgaagattgtacggtagccatttgagtaattcttttcttctaacttgtaagtgccgtctttcagatcagcgccattgtcgatttcaattgttttcgtatcgccagcttgagctgcttggactaattgttgagaatagtttttgaagttttcacttgaatgagtggcacctgttactacttcaactgcatctggattttgtgtttgttctaaagatttgttcaattctggaatgtattccttaggacctgtttttgttttttctttcatgttcttttcgtaatccgcgtcatcttttttagatttcccgtcttcatttagataatcgtagttagatttcgtgatctttccatccttaacggtcatatcaaaaacaacacggtagccgtttgcataattcttttcttcaagcttgtaggtaccatcttttaaatccccacctgctactttttccgctggtttaactgcctcagaagagcttgttgaagaactagctgctgtatctttatcatcatttccgccacaagcagctaacgctagtgtagaaaaagctaccactgcaaatccagatacgatttttttcattttcatgattaaactccacctttttatttttttgtgattctttaaacaaaatcattctaaaacatccctacgtttttgtacattaaatactatatataactattgttttttaatcatattatcagaaaaccgttaatattactttagaatagttcttatagacaaaaaaatgaactatatgtataatgtagtcgattgttcaggtattatcaatttattataattgtgcagtcattatcatttagaaggagcggattatcaatggcaaaacagaaaattgttgttgtgggtgcagggtatgcaggtgtttcagcaacgaagttcatggccaaaaagctaaaaaaagatgatgttgagatcaccttgatcgatcgtcactcttaccatacaatgatgaccgaattacatgaagtagctggcggacgcgtagaaccagacgcagtccaatacgatttacagcggttatttgctcgtcagaaaaatgtttcattagttacagatactgttattggtatcgataaagagaaaaaaatcgtcaaaaccaaattaggtaaatacccttttgatcaattaatcatcggtatgggcggcgaaccaaatgattttggtacacctggtgttaaagaacacggctttaccttatggtcaatggaagatgcgatcaagatcagaaaacacattgaagataccgtagcaaaagctgcctcggagccctatgaagctacacgccgtgctatgctcacttttgtggtttgtggttctggttttaccggaatcgaaatgatcggcgaattaatggaatggaagaatgttttagctaaggagcacaaattacgccctgaagagtttactctgatggttgttgaagcccttcctactatcctaaatatgctagaccgtaaagacgcggaaaaagcagagcgtttcatgatgaaaaaaggtattcaactgaagaaaggtgctccaatcactgaggtaactgctgattacatcgtcctaaaagatggttcgcaaattccaacaaacactttgatttggactgctggtgtcaagggaacctccgatgcggcagatttcggtttggaaactgcccgcggtcaacgcttgtacgccaatgaatacatgcaagcaaagggttatgaggacaaagatatctatatcatcggtgacttggttcattacgaagaaaacaacgatggcaagccaaccccgcaaatagttcaagctgctgaacaaactggacatacagcagctgctaatattgtagcgaaaatcaagaacacaccgaaacacgaatttaagagtaattatcaaggatttatggtttcaattggctctaaatggggcgttgctaatttgatggataaaatccatctatcaggcttcttagcgatcgtggttaaacatttagtcaatctgctgtacttctttacgattcgttcaggctactacatgttccaatacatgatgcacgaatttttccacatcaagaacgaccgcaacgtaactcgcggacattcttctcgttacggaaacgtattgtggagtgttccattacgggtcttctatggctctatgtggctaatcgaagcctcaaaaaaagttgtcggcgacggcagctatttgaatccaagctcttggtttggaagcggctcatggtttactgacaatgttgtcttccccttcccttggttgcaagagcaagtaacaacgggtgcatccgcagctggatcacacgcagctgaagcaacgaccgcagcaactggagcggctggcggcgcgactgacgcggctgctactgctgcgacacattttggtttcagttatgcttttggtgaaaatccaatgccggtttttgaaaaaatgcctcactggttttcaaatatcatggaattcatgatgccaaatagagacgttgcattatttatgcaaaaatttatgacttttgttgagattggtattgcattagccttaatcttcggactattcacttggttagcaagtgctgcaacgattggtttaaccgtagttttctgtctatctggtatgttcttctgggtaaacatttggtttatcttcgtagcgtttgctttgatgaacggatctggtcgagcgcttggtcttgatcgctgggtgattccttggattcaacgaactgtcggaaaatggtggtatggaacaccaagatcaatctacggaaaaaaataagtcaaatttatttgacgaatagtgaaggaaagttctaaagggcttgattttctctttagaactttctttatattatgataagaaaaagaagcaaacattagtatgaaatgctcaagtgaggataaatgaggtgtataatttgaagctgaaggattttgcaaaaaatagtttgctgcggccttgggacggcatcatcgttctcattctagtcgtgctctcttttgctcccgttgtggtctttagtctcaatcgcactgccagtccaatgcaagaggcggttctttctgttgatggacaagaaatcaagacctttgatctttcagataagtcacagagctacacttatcgctacgaagataaggatggcgactataatttgattgaaatcaaagaaggtcgaattcggattaaagaagcgaactgcggtgaccaaatctgtgtacgtcgcggctggatcgaccaatcaggtgaaacgattgtttgtttgcctcacaaattattaattgaaatcaaatcctcagacggaggggaacccggcagtgtcatctattagctgcttttactatgaataaaacacaaaaattaatttacatagcactcctagtagcccagggtgtcatcttggggttgattgaaaatatgtttccttcccccttcgccttcgcgcctggggcaaaactaggactcgccaatttaatcaccatcgttgcgatttttacgatgcccaaaagagacagttttcgtttgatttggatgcgtctgattctaacaacccttttaggcggaaccatctcaacctttttatatagcatgagcggatcattgttgagctacttcggtatgcttctagtgaagagtcttggacctaaacgtgttagcatcatcggaatcagcgctgccggcggttttcttcataacgttggccagctcttcgtcgccagctggatcgcgcaatcttggaccgttatgctttatttgccagttatgtccctacttggcattcttgccggtatcgtcattggtatcgccggtaattatttattagttcacgtacgtgcattgcaaaaattccaattagattatgaatcgaaaaaaaatctgaaaaaggattagaaggatagccaaaatgaaacttcatcccatgtggcaagattatcctgatcttgctaagcagttaaccacgaccctccaattaatggaggatgtggtgaaattaaaaaataaaaaagtcgaatcggctgtgttggatatgatccatgctggtggcaagcttttgcgccctgcttaccagctgctgtttgctcaatttggtccagaacaagatgaaaagaaagccacctctttagcggcttccatcgaaatgctccatacggccaccctgattcatgacgatatcgtggatgaatctgaattacgccgcggattaccgacgattcgttccacctttggtaacgataccgccgtttacgctggagattatttatttatctgctgttttaaattattatccgactactcaacctcactaaagagtctgcagctgaactctcgcagtatggaaaaaattctcgatggcgagttaggacaaatggatgatcgctacaaacttgatcaaactgttgaagagtatttggagaatatttcaggaaaaacagcagagctttttgccttaagctgttcagttggtgcctttgaaagcggcaatagtgaacgctttgctaaaaaggctggcatgattggtcataacatcggaatcgcctttcaaattatggacgatttattggactatcaagcagacgctgccacattaggtaaacccgtcctagaagatgtacgtcaaggcgtttattccctgccgttgatttatgcgctcaatcaagataacagtcaattacgtccttacttagaaaaacaaaagcagatgactgttgaagataccttgcaggtacagcgtttggttcaagaattaggtggcgtagactacgcacagcagctggcaaccgagtatactgaacaagcactaaaggatatccgaaaactaccagacaactatttcaacacaaaagaaaaattagaacgtctgaccagccaaattttatcacggaaaagctagtaaaaatccgaccaacatgtattgttcgtcggatttttacttttatttttcgactaaaccaaaactcataccgataactaagacaatcagcacaatgatcgtaatgaaaacatacaaataatccttttccttcgcaaatgcaaagattgataccactactcgtaagacgggtgttaaaatcaagcaaaaaagccccaacataacaaacgcttctccgtttaattgaaccaattcatgcataatcagtgtcaaactattcagtggcgcttgaccggtagccggttgaaagaataataaaatcatgccaatcagaataatcgtagcagaaacaattactccaattctcagaatataaccgatagaacgttcgattttcaacatttcctctttgttttccattactgaatcaccccgaatcctcgcagaaccatttgaagtcccataaacaatagaattgggataaaaatcattcgaatcacaattggtttaagtcgtgtcataatcctagagcctaccgttgctccaactaacacacccaaggctaacggcgccgcaatttgtggcaagatggccccactgaaaaaataaaccatcgcagaagccgccgctgtcacacccatcatcaaattactggtggcacttgatggctttaagggcattttcatgatggtatccattgccgttaccttaaaaacaccgcttccgatacccaataatcctgaagcaattccagctccaaacatcatagcaaagcctcctggcaccttctctacttgataattaatttgtttatccagcaccttatcatagtatgaaccattcagctttaacttttcagccagcgaatcgcctgccgatttattgatcgttttatctgttttaccgcgtaatttttgaatcatattcaatacggaaaacaataaaaagccaccaaacaaaataaatagaaaccccgtcggaaccactcccgaaagcaaggcgccaacaatggctccgatcgttgtcgcaatctctaaaaacatcgcgactcgtaaattcagcatgtcatccttcagataagcgatcgttgcaccagaacttgttgcaatcacacagacaatgctagcagcgatcgcatactgaatgtccaagcccatgactaacgtcaaaaaaggcgttaaaataattcctccgccgattcccaagattgaccctaatattcctgccaacactccaactacaagtaataaacctatttgactaagcataatttcccgccttcctgttgctattatagcgcaaattattttttaattagaaaatttagatcaataaatttaaaattcaaatagatgaaatcactaaaatgaatcattgtttactttcttctaaagctaattgcttatgcaagagcttctttacccgatccgattcttcttgtggaatcttttgataagaaataccctcttcacctgtgaatccatcaccgataaagccttctccttgtacctgctgactatcaatctccgtcagacaagaatgataaccagtcaaaatagtctgcatttgatgaaaggttagatccgtctttccgttttctccaattccatctaaaattttctgataactaaaaatacttttcgccgaaagcagcttattgatcaataattccattacttcgcgttgccttccttggcgaccataatctccggttgggtcttcgtatcgcatccgtgaatactgcaaggcttcccaaccgttcaaatgttgttttcctttgggatagtcaattccttcagctgaaaaagcaaaatcattatctacagtaacacctccgactgcatctaccaatgtctgcagaccatccatatttaccgcgacataatgatgaatcggaatgtccaaaaatttttctactgtatccatcatcatttctggtcctccaatcgaatgcgcatgattgattttgtcctcatagtccgcacccacaatttcaacaaaggaatctcgcggaatactcacaagcgttgctttattcagttgattgttcagagtagctaccatgattgtgttcgctcgaaaatctgtctttctcttcgcatcgtttgcaattcctaaaattaaaatgcttatcggttcggaagctgctagtgacttttgctttttctctcgttcaatcggagaatacattgaatccgccattttttgtgaaccatggtaaacttttaaagcaaaaacacttacacccgcagcaagtacaactaacattgccaagatgcttaacagcaccttttgccatggtaaaaatttagctttgtgatccactgaactcttttgtcgtaaataggggtaaaaaagactggctgtgccaaaagtaattcctccaccaagaaagagtccagcaataatatcgctaaagaaatgtacgcccaaataaattctgccgcctgtaatagttatcagtaaaaagattaataacgattttattattaacggcggcttcttttctataaaaaaataaatcagtaatacggaacacacgaacgtcatgaccaaaagcgaatgcccactaggaaaactatacgaagagcgtgagatatattgtatttgatcaggccgcgatcgttgaatgagctgtttcagcaagtatcctattccacttataaggatcagatttccaagacaccaaatagtcaacgctttaaaattgcttcgcagtaaaaaaatactaatgaggctaaaaactacaagcattggaccaatcgtagcgaatttagcaatcacacccacaaaagttgttactgccaaaatatcaggcaatcgatattgaatgaatagctgatctaaatgagtcagccattgcgcattcagtacaactgccatggtaaaaagaaatactatgagcaacgcactcacgctacttagcaaaaaggtttttcgcatattcatgtttgtctctccattcaatttttcttaaaccccatcatgatcccaaaacctatacctagaacaattaaggatgttcccccttgactcaaaatcggcaatgggatacccgttaacggcagtatgccgattgccgctccgatattttcaaaaatttggaacagtaaactaaaaacaaaagcggcggcaatatataagttcgctttattattcgtattgattgctgcgtaaaggatttgataaaacaaatagaaatagagaaaaataaccaaggttcctccaataaagccgaagctctctccaacgactgtaaaaatcatatccgattcccgaacaggaacataaactgacgcttgtccttcccctcgtccaaataatccgccagagccaatcgcataaagactctgtacttgttgatacgcgatggaatcgcgatattgaaagggatcgacccacgctcgaacccggtctaattgatacgtcttaaaatgcagccaataaagcagtttatttccccactcgctaaatactaaaatcagtaacgtacttcctaaagctgcagctgcgccagtgatcgtaacaagaattttccagtgaacaccagaaataacaaataacgcccctaagatcgcaataaagaccaaacttgtgccaaaatctcgctgcataaacatcagtaaaaacgtcggtaaactatatagtaagattttccctatatagccaagatcatttctcaagcttcgttgcggctggttcatttcgtcgatcaatgttagtcgaaccataaaaagaataaaactaagcttcattaattctgaaggctgaaaagaaaatccaccgattcgcagccaccgtttcgtatttgtcaccgcaaacatagccgggtcatgaaaccaatataaaagagccatcaagcccaatgaaagaacataaaaaagcggggcatatttcaataaatgagacgttgtaatgcgactcactatccccattgctgctaatgaaagcaagcaaaaaagaatctgtttcatcattacacttttcacatcgacaccatccagctcagctgccaatgattgaataccgatactaattagataaaacaagaaaagcggtaaaaatagagaataattaaattcgttgctcaaacgtttcatcatgtgtttggacctccgaagataattttaagcagataccaagagctgcagaaagaatcaaatagctagttccgccataactaataaaaggcagaggcacacccgtcatgggtatcaagcctaaaatacttgcgatattgatgcttgtttggaacaataacaaacttcccacaccgaaataaatcaaactaacttgctggttgccttccttcgatgccaatacaaatagacgaagcgcaatcaaaaaaagcaacgccaatacgaataacccaacaatcacgcctaactcttcaaccaaaatcgaatacacaaaatccgtttcggcaactggaaggtagccctttttggtgatactatttcctagacctcgaccaaagaagccgccattataaagagcataataggaattgctcatttgaaatccttttccataaggatctaaaaatggatctctgactaatcgaatacgatcataagtatgagcgaacaattcaggcaatagatgatgactacccagaaaaagaatcatgccgcctgtcacaacaatccccataaaaatcgttagaaagagaatcaccgataactgatacggtaattgcgcagtagttatgattattaatgcgatcccccaaataataattgcacccgttacctttggttggagtaaaatcaataatccactaagtaagacaaggccacaaggaaccaacatttcatgtcgtgtccgtttcactcggaaaaagtaagctaaataaagaattaatgccacatttgtcacttccgatggctggaattggattcctaatatagacacccatctctgtgcaccattaatgctgacgcccgctatttttgccagcagcagactaaccaacccgatcactagcaatccttttgctagtattccatttgtcaaaacattgcttttcacatgaaaaatgaacgcaattagtaaccaactcagcccaataaaaattgcttgcttactaaataatgttaacgggttttctccttcagccatcaggcgataggaactcgcactgaagacaattaaaagaccgattagactaactcccaaataaggtagcaacaatagccaatcgatctttcttttttttatcatgtatagctctcccttcatcaagtaattgtttgagacgagagagtccacagtaaataacctaaaaaaaacaccaaacgttagcaaaaaaactaacaagtctggtgtctcacacaatcaatctcatcgtctgagttttagcactaaacaacgtaaagaattccttcttagctattttatgaaaagccttaatccgacaattcctgttttacacattggcgtctttcgacgtttctgcgcaatagcttatatttgtttaggagcctcacctaacaagtttacttatatttactttcacaaagaatactactttttttatacgtaaatagcaaaaaaaatcgtcataccttacgtcatctttaaaatcgcttatgaaatcctttactaaaaatttactaggaaaaatattctttttatgatattcaaatcgagtagaggggaaagccaactgaccttccgccccttgtatattagagttagggttttaaccttccggttttgattggataaccctatgaaccatcgttattttaatttggtattaactcatttcttttgagataatatatttattggattgagaggctaagccgttccccccttgggtcattgaacccgcactcgagagactggctcctctctctgataagtggattgcgtatgagttagatgttgaaagtccttactttactccgtatctcgtacaaggtagtgacgcttttcagttgagtggatttcaatccaaaattctttttttgaaaggtcagatatacatgtactttttaggcattgatatcggtaaacgcactcacgttgcttctatcatgaacgaggaaggaaaggtattactaaaaggtttttcatttcctaacaccactgaaggagcagagtcattaattgagcgaatggtcgactattccggagcacccagtgactttgttatagggatggaagccacggggcactattggctgtccatcttttcataccttcacgaatcagattatttgattcacgttgtgaatccccttcaaacagacggatggcgtaaaggtacagaaatacggaaacgaaaaaacgatattattgattctgttttgattgctgacttaatgcgctatggctcatttgtcgaaacggtcttatccgatgaaaatgttttttctttgaaacaactttctcgttaccgaacttatttagtaggtacagcgagcgacttcaaaagaaaaattatagccgtattggatcaagtctttccagaatacgcgacgatttttaccaagcagggcgttttcggaaaagcttctaaagagttattgctggcgtttagtgccccgatcgacttagaaaacatttcctcagaaactttggcccaatacttagctgagttaagcaggaaccgaatcaaggcagaaaaagcggaccaattgaagcaagcagcttctaactcctttggagtaaaatttgctcaagaagcgttcaccttccaactacgttcaatgattgaacaattaaaattcattgaaagccaaataaaggaaacggaaagagaaatcaagcacataatggacactttaaattctgttattctcacaattcctggaattggtcctataaacggtgcgactattcttggtgagatcggagatattcaaaaattttctaacccgaaaaaactcgttgcttacgctgggatagacgcttccgtgacacaatcagggcaatatgaggcaacgcataatgttatgagtaaacgagggtctccatatttgcgaaaagccttgttttcggcggctttagtagcttctcaatgtgatcctgtttttagtgcgttttaccagaaaaaagtttccgaaggaaaacatcatctaactgccttaggtgcggtttctcgtaagctttgttacgtgattcatgctattttgactaaaaacgagccttatataattgtttctgattagctattgaacattcaaaaaaactaatggtaagaagcttatttgttgtacccttttttcggaattatctgttataaaatattttttgatttggctaatttttacttgactctatatagttagtctctcgataaaacagtatcagtcttttagatatatcgacttgcttattataagtcttttagacatattgtcaaataaaaaatattcttattttattagaaaaatccgtcttaaatgagaacataaagaaacacccacaacggattagtcgcaggtgttgagcacttaagaattattcgcaaatataatccaaaaaactgcttgcttttttgtcgataaagataaatcatggagttgaagtacctcttgccacaagcggtaaaggaaacgatttttgcttttcggaaaggacgaattactcaatgaacttaatgcagaattattatcaagaacttcagaaaaacatggaatacgtcatcagcaatgagtcagaggcgataactaaagcagcgacactcatgagtacttgtattgagacggaaaataaggtttatttttttggcacgggacattcctatattgtcggtcaggaagtctttgcccgcgcaggcggctatgcgggctttatcccgatccttgaaaatgaactaggcatgaatcatgccttcaaaagcacgctgattgaacgaactactgaatacgccgctgttttgctagaattgtatccgtttaaaaaaggcgatgtaatcgtcatgacctcaaattctggacgaaatgcgctgttaattgaactggggctgcgacttaaggagatgggcgttagcatcattgccattactgctttggaggcgtcaaaaaatagtattagccggcacaagagcggattgcgcttgtttgagcttgcggatgttgtccttgataatcgctctgtttacggagatgccagcctttctcataatgatgaaataaaaacagggcctacctcaaccatcatgagctgctttatcgtccagcttttagtcagcgcgttcgttcagcttgaagttgaaaaaggcggcgatgttccagttttcagaagtagcaatatcgatggcggcgatgcctataatgagaaattgtttgaacgttatcggtaacaactgaacgtaaatgattctttgataaaccgtaagccagaaacccttttcttcattgaaagagcttctggctttttatcacttcattaaaaattcttttcgttaactagctcgttttctcaataaagccacgaatcgcttgatcgatcacatccccgttgccatcaatcgtatgtccgccggtctcacaaattatagtatctgccttaactcgtttaagcaacttttcgatagcctcatacttcgccattggatcatctttcgcgtgacaaactaaaatcggcacgctgatcgtttctaaagcatagtcatcatagttcaaggacatatccgtatttgtaacctcgctatccgctttcaccccttgacgtctaggggtagctggcagcatggtttcaaacaaattattgctttcaatagtcgaacccatcattttattgaagacaaagccaaaatgcttcattgaaaaccacataataaagtcattgacgataaatggtgggggtccttgcagccccattgcctttatttcttttggggttcttttctgatctggcgctccagaggatagtaatatcaaccccttcagcctgtcaggataatccaaagccatccttaatccagcggcaccgcctgctgaagttgctagaatatagcctttttcaatattcaactgatccatcatttcaacaaaggcctgagcttgatttttcggcgtgggatcgctcggcagatctgagcctaaatagccaaagcgagcaggggcaatttttcggtagtcctctcctaatacttgtttcagactggtcatcccctgatcatatccaccaaatatcccgtgagaaatgataacagactccccagacccttcatcaagatagttcatttttccgaagctggtaatcaggggtttagcgttatactgattcaaacgggcataagcgtttttcatgtctttcttataaagataaaattctatacaaataatagttaataccacaaacattattgagtatcccaaaattgttctccttttagagtgatgattaaagtataacagataccgattaacagttttaaccctttgtagtaaaggtacactttcaatgtaaaagcagcttccaactttcagctcggaatgctacacttaagatgatttgaactatttttgacttttaaaaagattccgaggtgtggttatgattaacgaagagactcagttagactctgctttacaattaaaaaaatacgtacgagacattggctgtccagagtcagcggatattcagcactgtctggaaaattcagcggttatcgccaaaattctggctgaaaagattcgcacagataccttcaccggtctgcgaaagctggaatttctattagcagagctttcggaaattcccttctttgaacggttggaaacggttcaagtcatgctcaacacactttacaagcaaacaaatgttgacgaaggcttttcactaactggaaaacaaaacggtgttctggcctgtcataatgcactttgcacatcaatttttattcgggctggcaaaaaagaatgggctgaacaaggtgttcgatggatcatttcttacttcccatttgatagaaacgagccctccaattggcagggtaaggacctctttcaacgctttgggggctgtgtcggaaattcaccttgctatgatggtgtcgtaaaatcagtcaaagccctctcagagtatgcagaaaaatacggagagcttcccggtcttcgtacgaagttacaacaaggtttagactattttttgaagcatcgggtgattttccatcagaacaacgacgagtatttatacgatgatttgatcacgcttttttacccctatccttatcgcacaaatatcattgaagctcttagtgttttaaaaactgaaaagcttctagatcggcctgaatgtcaagcggcacttgactatttgaagacgaaacaacggagtgatggcttctggcaggctgagaagatttttatgaaaagctcgtgggtaccttttgatgcgttgaaaaagccaggaatgtggataacggatgaaattaattggatttttagtgcagtttcttcgagataagctcttatttcctgaatactaaaaaaacgaccctcagaaattagaaaaatctaactttgaaggtcggtatttcattgactgttaaaacccaagaatacgaatataatctttgtttgtaggaattattcgagtgatttcaattatctcgtcgacaatctcataaaaaataatgtactgttctaagatataaaaacgcatgttagtcggtgcatctattttagccgttaaagtctgaccaagcaacgttgtcacttttaaaaattcaaaagctgtataaatcttatccaaaaaatcagccaccgttgtttcgtaactgccgatttccttcatatagaaaacaatttctgacaaatcattctcaatttgaggagagatgtttaagctatagtttttcattcattcgagcctttaattggtccaaggtcaaatgaccttcctctttcaacgcttgcttccccttatgcagttcttcaaataaagtaagagtagccttcattttttgatactcttcaaaatcacttacgacgtatcttgctcgaccattttttgttaatataacttcttgtccagccttcacattagctaacacttggttataggaccgcatatctgaaacaggtatgatattttccatagaaaaccactccttttacacagtttaatacaagttacgcaatattttaagtaacaaatatttccgtttaaaaccgtgcacatataatcctagaattttacaaagctagtaacaagttgtctatagcattaatatcgcctgaatcatttcaaatcatgattgttcttgttgccaaataatagaacatcacttttttaaaattagtgactcagatgataatactcttcttccatccgctgcattcttgcacgttcctttttgttgtaccaaggagaaacagtgaaggccaacacatcgttgatcaaataaaccgagctgttgacaaacatcgctaagctggcggagccatgtcggaatgaaatgaaccaaagaaccatttgggcaaggcctgaagccagccaccagaaatattgattgttgtagcgtaagaagctgataattccggcactcagactaatagaaaaggcaatcgcatcaatccaaggccgcggatcgtcggtgaagcgttggatcaaataacccgatacaaaataaacgatgatggtactgataatcgcaatcccccatgtttttccggtgaacttgcggatttttgcggccatgttgtgattccattccttacttaataaaacaggaatatcaagggtgatcatataggcgatctgttcgccgatgcttaaataattcttcgctgaatagccaacataaataaagcagattgccgagataattcctaaaataccattgaccgactttgcggcattaatggacagaatacataaaacccctaaagttgtaccgatgaaggtaattacagttagaaggttgatcggttggttaactagtgtcatcacctgacagcctagactgaagaaaaagaggtaataattttgttgcggccagccttttaactggtgaagtaaaaatttaaaataatttatcatggtggagctcctcgttataaatatttagggattcatctttatatctataccctcgaaaaaacagacgttctttaattctcaaataaaggacctattaaaaaattcctttttcaatatttccatttgaataataacaaggacttttcagttcctgctgattcaacttattcgtttcttctttgatcagcttgatcactgtttcagcagcctgcggatcagcgacaaaatcgtagtgatcgccgtcgatctggatttttggacaaatattaaaattatcataccattgctcataacgctcgttgaccattcgatagtaatcatacagctcaggatttgcggcaatttgttcgtaatctcgcccacgcttttgaatccgatccagcatcacatcaaaggaaaccttaatatgaaccattaaatcaggccgtttctttggtgcggcagtctccaattccttcaacatcgtgtccaataagttgtcatattgcagcacttcctgttgacttacgcgcccaagatcagcattcaaatgaaacagtaaactgtcttcataaattgaacgatcaagcacgttatccgcttgcttcaaggcatccttcatcgccaaaaagcgtttatttaaaaagaatatttgcagcagaaatgtatatttttctggattcgagtaaaacaacggcaatacttcgttatcatccacgttctcgtaaaatggttttgaattcatttcctgcgacaacatatctgtcaaactactcttccctgcaccgattgtgccagctattaatagcatcgtttcatccatccctctctcattaaaataagaatttatcttttaaatccttgataatagtactcctaattttttttgatgtaaagactagattttgtgtctaattagtgatatacaaaaccgacaacacaatatatagtgttgtcggtttcaagaggttgtatgcactttctttgctatgttgacgatttttcatcaaaaatattggactcgcagttatctctttttaggtactatttttctaaaaacgtgaaaaataggtttattttcgtttcgcatacgatccaactaaacttctcgtatgtttgaccttctaagttgaagattttactaaccacttttaatcctgcaaaaagtcggactcgctgctatctctttttttggtactatttttctaaaagcgtgaaaaataggtttattttcgtttcgcatacgatccgactatacttctcgtatgtttgaccttctaagatgaatactttactaccaacttttgatcctgcaaaaagtcggactcgcaaaagagacctctttacttcacgcaaagaggtctcaaaatattaataatcaaattgacggtagtaacgacgaatgtctaatggatggcaatttaatttttcaacatgggcatcgattcgttgggtgacacagtgcattaataaatgcggtagcactcggccgcgatttttctcgctgatgcctttgattgggtaatccttggaatcaatgaaggtatagtttccacaaatacgtggtaacagatttttcacccgctcagctaatggacgctgctcatcttcccctaagaacaatgttactggtgtggtttcatcaacgatttctagtgttccatgtaagaattcagcagcgtggattgatttagagcgtaaccagctttgttcttcccaatagcacatcgcgtatgaataaacggcgccccactgattaccagccccgataaagtaatgcatatcatcgtgacgatgtttttcagcaaacgcacggccaaagtcttctgcttgtttttctgcttcgactaaccctttggctaaatgattttccaattcctcataatactcttcataatctggaaaatcgccattcttgttcatcaaacgatccgcaaccatgaaaaatttgatttgctcagttccaggattcggataggtaatcacgtgatcacagctttcagccagtttcgtgcctgccgtatcaatgaagcctaataatgtcgcgccaacttctttaatcatatccactgccttcacgacttcttccgttgtgcctgttactgaagaaagaatcactaatgagtccttcgtcagtctgcgattaccggtagtataatattcagcagcgtgctgcacatacactggcagatcactgcgaccgttaatatacgttactgcctgcatagcagaagcataagtaccgccgattcctaaataaaatatattgtcgtagcctttttcccaaacctcatcaacaattttttcgacctgtgggcgtagttctaaggctccttggatatcatcaatttgctgctgttcattaaatttcaacatgtcataaactcctcaactttatattttactttttaatactgcgtcaaaatcatcaaaaattcgtttgcttaaatcaattcccttcgccgttgccgtgcgatacgccagcagttggaacggaataatcaatactaatggagagaaaagctctgaaacctcaacatctaaacctaaagtatcgttatcagaggctttttctgtcgtcaccctcaggattttcccaacagaactatccatataagccgctaaagcctgtgatctttcaagattcacactaggtgtttcgataaagaacagcgtatgttcccaatcagcttccaaatatggaccatgcatgtaagcttctaattcaaagccttgactaggtcggcgtacagtttcagtgaatttcgtttcaaactctttggctgttccccagttcggtccataacctagtgcaacgaaacgtccgccaagcttcagcagattttcgtgctgctcaaaaaagtcattggattttgtgatcacacttggaatatgcgtaatcaactccgctaattcttccttaagcgcatgaagcttttgctcgtcaatatgttttttcgaaacgccgactttgattgccagcaggatcaattgtaaaattgttgctgaaaagccttttgtaacaaagccaacggtttcgattcccatgtttaggtcaatgactttatcaaccacttgagcaatcggactttctacatcgctggttaacacgatccgttgaatctcggtgccacttaattccttcatcgcatcgattgtcgaggcacttttaccgctttgggaaacgccgataatcgtatcggttcctttgatcaagcgtccataatgattgaaattatagggttcttcaattgtaatcgtgacatccgccaatgtttcaaacgcgaactttgctgataaacacgcattgtaagaggaacctgtcgctagaatcgtgacagtattcatttctgccaattgtgtatccgtcgaaaaatcatactcggttaaaattttcgtcaatgtttcttgttcttgatcaatataatcaagcattgtcattgttgacatgttttccctccattcttaaaagatcccgattaacgaaccaaggatgccgaaaacagctaagcctaataaaatcgtcaaggctttgacttcctttttcaataaatagaaaactgcgccaaaagctcccagtgataagattcgcggcacgatatcgtcaaaaatactttgaactgttaccgcattttcacctgtcccgattttcagcgggatattgatatcgatcattgaagcagtcattccgccaacaaccatcaacccgatgattgaagcacctaaggtcaagctgcccatcatgccattctcctgaatcttcttcaagaagccggttcccaatttatagccccaagaggttgcaaaatagcggaacaataaatgtggaatattgaaaatcagaataaacaagattggtcctaagatattgccctgcaatgccaaagaagtccccacgccagtagcaatcaagcgtaaagtcccccagaagaaggaatcgccaatcccagccaatggtcccattaatgacgttttgatattatcgattgtggaaacatcaaaattcggatcattggcattttcctcttccatcgccgcgttgatccctagaatcaatgtcacgatatgaggggtggtgttgaagaactccaggtgacgcttcaacgctgtcgccatcgcttctttagatttatacaatttcttcaaaatcggaatcattgcataacagtaagccagattcatttgtcgctcgtagttccacgagaattccatttggaacgaacgccagaacaccttactcaaatcttttttcgtaattttcaactcattgttctcattagaagtcttcatcatcatccactacctcccctgtagaagtttggacactgttattttgtccgccgcgcacattcataatattgattaccactaccgctacaatcgcaccaaaaattgcgattcctgtcactggaatttcaagataagcagccaaagcaaagcctaagaagaaataaggcgctacctgtttattgatcaacagtcgagcaagcatcgcaaacccaagtgctgggatcaagcctgttgcgacagataatccgtgctggataaattcagggatcatatccaataaatttccaacggttttactccctaccataaacgaaatcatgacaactagtcctaacatcaaagatagaccaaagccagcgattaaatgcattcgctctacccctttataattcccatcagcagcatatttatccgcgttttggttcatgatcggaatcaaaatacctagataaatatttttcagaattaaagttaatgtggcaatcggcaaacctagcagcaacgccgtttctgttccagcaccagcggtaatcgcaaaggcagttcccaaaatgcctcctgtcactacatctggtggaatcgccgcgccaacagagaaggagccaataaatgccaactctagggttgctcccataataattccggcctttacatctcctagtacaatcccggtaaaaagaccagtaacaatcggacgagataatagcgatgttcctaatgcgtactcagattgagcaataaatgcgactaaaccaagtaaaattgcttgaataagcatgtttcttcaacctttcttttttaaagaacttcagtaacagcaacttttttatcggctggtacttgtcgaatctccacttcgagtccgttaccaaccatttccttcaacatttcttcttcctctggcaaaacattaaccgcttttccgatactccgtgtaccttccttggctttgatcccgcctaaattaatcttttgaatctctggaaacgcctccgccaatttttttgcatccgcaatcgattccaccacgataaataatttgtacttatctgttacaccgctttgcagcgcgacgatagagtcctcgatgtttttgataacgagtttaactccttgtggttttgccagcttgatcgtcgtcttacgcaaatcgttcgtcggtacatcatcgttagcgattaaaatacaatctgctcccaacccttgtgtccaagaaaatgcgacttgaccatgaagcaaacgatggtccactcttgttaataaaatcatttttatccctccatttttattaaaattcttcttcttccatttgtttcgtaatcgcttgattgcaaaattgaattgtttgcttagaagtttctaaagtcgcttcaatcaacttcggcaatgaatcagcttgctgaagctgcatcgtcaattcaactaaaaaaggcaaattcatccccgcaactaaatagaaattcggacgatcaatctgtgtcaaaaattcattgttcacacttccgccaaataaatcagtcactacaactaattcacaatcgtgatatctattcatgatgttctttacttctttttctagatcaaaatcctctgtcaaatagcaatccagcgtttcgatggctatttgccttccgcaaattaattccagcgaagatgtaatccctgaagctaattttccgtgggatgcaagaacgagctttctttccaatcatattcacctctcaatcttctctacacctaaataaaagcaagcggtgtgccaactttagtggcgcaccgcttgctttatcaaaattcatcctcattcattgaggtatccgtgtttttgtaaacgatatcaaagatataagccagctcggaatctggtatcgtgacactataaactcgttcaatgacactaaacgcctgtttgatcctttccagccgttctttttgacactgatacaaatcggcataaccttcataggtttcaatcggaacatttcggatcaaacgctcaattaagcagctgacatgcacgtacaacgccaacttcttcgcattagaaagctgaattcttcccgaaagctccaaatcccgcataaataaatcaatctcactcatgactttatcggtatctagaatggtgacagagtcgattaccttttccaatgaaaagttacgaattacattcgtgttgaaaatgtggttttcctctacggtcatcacaggtgctaaccattcagttaaaatctgctgctcatcaccagagattaattcttctaaagaaagataggggacttcagcaattttaggatcatccgttccaataatccctaacacgtcataaatcgaaaagaccgtttcatccaatttcttttcctctaaaacgcgatattcgtaaggcaaaatctttagctcgcaggtacttggaaggcttttttcaagtaaatggcaaatttgattggccgttccgattccagtttgacaggtggttaatagtgctttggtgcgattttcctcaggataaatgatctcccaatcaaaagccgcctcaactgccgaattttctgccaactcattcaatgttcgctggtgcataatactttcccccaccgcaacagctaatggtgtcgtgacattattcataatcacaatcggcacattgatctgttttggaaaaaactgataaatttccttcaaactgcccatatccactaaaatgaccaagccattggaaatatcgttgttttcactatagtctagaatttcttctgcgatctgctgaggggtcacatccagcggcatatcaaaagactcaaaaatatcttttcccaaaaagcgattcgctacattggcaatactgctggcagtcgcgtatccatgggcgacgatcaccgctttggtcattccctgctctttcgtccaatcagctttcttcaaatacaaggtcaagacaatccgatccatcgctgagatttcgatatcgatcttaggtttgcacaattctaagattctctgcacataataatagcttgcaggatacgcctccgatacctgaacttcaagctgacggatcagctccatgatttcattatcttctgatatccagtgactcgaacctctttggaataaataataccccaccgcatacacactattgccgttaaatttaatttgataagcactttccatctggcggaaagtttcccgcacatactgagtcaaatacagtagcatttcatgcttttgctgccgatccgtttcaaacagcaaataatcaaacaattgatcaacaatttcctttagctttaaatgacaatcgcttagatctccttgagctttttgatactctaaaatcattttggcaaagctatcttccactcttctttgactttgactattggaaaacattaaattatccaacgtagaatcatcatgaatcaatacttcttctggcaatgtggtttgcagattctggttattcaaagaaagcagcgattctggaagatgatagatcgtcagtctaatctgctgattctggattgcttctaaaaaagctttagccaccatcactttaacaatattctgtaattcgccgatatttcctttaaagctgccactagccaacagctctaatgtttgtccgctgataaccagctctcgcttgattttcatttgttcgctgatcaggaaggaataaattagttctagtcgttcatttcgcgctcgctgctgcaatgagggaatcgttacctgaatcggaatccgacgaataaaagttgtcaaaaaattgcttgtcaaatcttccgttgtcgcaaaaaacaatctagtttgaacattaatcgggtgattcgtatcccccattcgataaatcaagccttgatctaaataagtaaataatttctcttgtccctctgcatttaaacggtggacctcatctaaaaacaaaataccgccatcagctgcttcaaacgcccctttatgatcagcgtcagcgcctgtataagcacccttgatactgccgaaaagattactcgtcagcaattcaggattattcgcatattgggcacagttcagcgtaatgaaaggcgcatcttcagcaatcaactcattttgaatacaataatgataaattaatttaactaaatagctcttccccgtaccactttctccattaattaatacaggcaaaccgccatccggataattaagcgctgccttgatttgttcaatcacccgattcaagcttttgtcgtgcccaatcaaaagtgaaaagaaatcctgttcttttccaaacattggttgctcggataagatcgcttgaacgctttcataataattcgtactcaatgcaaaaaattgcttttcaaatgcgcctttgtgaaaataataaactggacgcgaatttatttttaccaactcgccattttctgttagttgatttaaatactggcttaccgtattccgtttcactttaaaaatctccgccaatttcgaagcagtaaatagatcgctcaattcattcaaatcgagaaaagccgtttggttctttaaataatttaacagttcttctttcaatacactcccctcccttctcttataatagaaaaagcggcaccaaagtcaatatttgttttttgcctttgtcaataaaaaatagttcaaaaacaggtctccataccccaaaaatggttattcattatctaataggcaatattcatgccaatcaatgttgtaaatcagcaggcaacgttgctctatgaaaatggattgttatttccaacactctaataaaatttatgaactgttgaaaaaagtgttgagttttttctttcgatcattacttaaattaaaaatattctcacttgacgcttcgaacttttattttttcaaaattcttttatagtgcgaacataaaaattcggcgaattttaaaatgaacttagccacttcataaaacaaaaaaacgtcattgcccaatttcatgtattattgaagttcctacacaatcaataaaggatgaaatgacaatgacgcaaactgagaataccacatttttacgcaaaggcaaacaccttgattatgaagaacgaaataaaattgaagcttggaaacaaatcgatcgccctttgtcgaatcgtgcgatcgcaaaattactcggacgtgcccctcaaaccattcatagcgaagtaaaagacggtacggttcgccaaatcaggcgccaagtccaaaacggtaaaacctacgaatatgaatcgtttgtttattccgcagatgctggtcaagccgcttacgaaaacgcacgaacaaattctcgcaaacaaccaaaatgggtttcttcgccaaagttcatggcgtatgccgatcatcaaatgaagacagaaaaacaagcgcccgatgtcgttgttggtcgtgcaaagaaactcggcttgtttccaaatgagacaatcccttgtaccacaaccctttacaactatattgatctcggctggctggaaacaaaaaatattgatctgcatctcaaggttcgacgaaacaccaagcgatcacagagtaggaagaataaaaaaattctcggcgatttgatcgaaaagcgaccagatattgtggatactcgtgaacgttttggtgattgggaaattgatacggtgaacggactgcgcgttggcaaagaccaagcattgcttacattgaccgaacgtaaaacacgttacgaaataatcatcaaaatcgatggaaaagcagctaatccagttgatcgtgcactgactgctttaaaagaagctgcgggcaacgatttcgaagtgcttttcaaaacgattacttcagataatggtgctgaattcgctggtctaaccacacttcttaaagatattacggaagtttatttcacccatccctattcttcatgggaacgagggaccaacgaaaatcataatgggatcattcgccgttttataccgaaaggaacacgcatggaagatgtagcgttgaccaccattcgtcgtgtacaggattggatgaacaatttgccgagaagaatattgggttacgccactccgcgtgagtgtttattgaacgagctatcggagctatccttagccgctagataaccaacaaaaactaaataaccaatgaatttcaataagtggctaacttgcacttgaaatttgagaacataaaaattctgtcacaataataaataaaaaactaaaacgtgtcacatcgattgtttttatttgtctaatgaataaaggaggcaaaaaaataatgaacatcgaacgagaaacagcgctaattcagtccgccttgagcggggatagcaattcgttaacgaagcttttaagcgaagtaaaagatagtgtcttcaatctatctttacgaatgctgggaaatatctttgatgcggaggatgccacgcaggagatactattaaaaatcgttatgaacctcggttccttcaaacagcaaagtcgtttcagtacgtgggtgtatcgtatcgctgtcaatcatttaattacagttcagaggaaacgatcttttcaggagcagctaacctttgagctgatgcaaaaagatttggatcagtcgctgcctaccaaggaatctgctttttctgatttagaggaggatgaattagctgaggaattaaagctttcctgtacaaatattatgctccaatgtcttaagccagaagatcgctgtattttcattctgggcacaatgttcaaaatgaatagtcagctggctagtggacttctgcaaatcacaccagaaacataccgcaagaaactttcgcgagctcgaaaaagaatgggaaaatttttagagaactattgtgaacatgcgggaggtaaatgtgactgtaaaagacgtgtcccctttgccatcaaacaacatcggctaaacccgaacagactggattattcatcattaaagaaatttgatttagccgaaattcagcagcaaaaagaaaatatggagtttatggacaaccaaacacttctctttgaagctttatctcattaccaatcatcgtttgatccaccaaaattcttaagcaaactgctagaatccaaacaactgttagaattaatcaaggaggatgccacctatgacctatgaaaaaattttcaactatttgtccgcattagagaaaaacaatcagcaagaatggtttcagcaaactaaagatcaacgcaaaacagctgtgacagagttctatcaattagtggatgaactctctcttgcacttcatgaaaaagactctgaaatccaattcattccagcaaaaaaattaagtttcaagctcaatcgagatacacgcttcagccatgataaaacaccctacaatccagtgtttcgtgctcatattggaccaaagggaaaattaccgatcccagtaggctattacatttttctaaaacccaacaatcaatccttcttaggcggcggtcttttcgccgatatgttttccgaagcaactgaaatgattcgacaagcaatcatcgaacacgaagcagaatttctaacggtcattcagaaccctgtgtttactgaacactttaccgtactaggcaagcaattaaaacgaatgccgcgaggctacgaaaattatatcgattcaccgatcgccgattatctaaaatataagagcatgtacttggaataccctttgacggatcaagaaatacttgattccgatgattttgtttcagaaactgtagaaacattcttattgatgaaggagttcaaccagtttttgaataacgcgttaatagattttgctttccctaagcgaagataaaaaaacagcaaatcatcgtattttgatgatttgctgttttttatcttctatagtgtgctctctatttttgtccttctagctcttctactggctgtttactctcctttgtttgaataaccagtgaaactcctcctgctaaaacaaagactagcgcaataaaagtaaaggctccgccatatgacccgctggtattcactaaccaaccgataatcattggcgcaaaaaagccgccagaaacaccaattgcattgatgattgaatacttagtcgaaacttctcgttcagcaaacagctttactggtaaactcatcaaagtcgcaaaaccaatactcgcagcagctactgccaccgacaacaaaagcatacttaccactaatgaggtgctacttgataataaaaaggcgaccactccgcccaatgccgagacaacgaaaattacttgtttttcacgattcttaaaataacgaacgatcatcgaacctgcgaacattgcactgagcatcatgaccaacccaatcaacgcactcatcatcgccattttattcatcgtcatattgaattcatctaccaaataggaagcaatccagcctgtcatcccataaaccgcagcattaatgaagaacgcagccaaaaccatgatccaaacattccgatccttgatcatttcaaaaaaagaaatattggattgaccagtagaaacaataggctgtccgttgtttttcggaattcctcgaagcatcagaaatccaatcaaaagcacaatcgtgccataaacaaaataggtcgttttccaaccaatcatagttagcaatggtgcaactagcaacggtcctacaattccagcaaaaccggatgaggcaatcattgaggattgtatcgaacctcgttttgccggttcaacttcctttgtgacaaacgcgctgaccgcagaaggatagccggcatgagcaaatgagcccgccgcaaaacgaatcaggatcaaatagatgaacgaaaagccgaagcccaaacaaatcatcaatacacccattagtaaaatcgcaaaagtcatgattttacgactgcctagacgattgcctaaaaagccaaagggaatttgaaacagggtatatcctaagaaaaaagcacttaaaatcaagcctttttgtcctgcatcaattcctaaatcctgtgcgattggaatgactgataagctaatgatgttcttgtccaaatacacacaggtatatccgagaaatatcaggatcaatgatcgattaatcttgttttttcccataaactagacactttctaaataggccaatgcggcttcaacatagacatttgcaccaaattccaaaatggattcatccaaaacaatcttcgggttgtgcagcattatttcagtatcggcagccgtaataaacatcgtcgttgttggaattcgatgactaatttcaccaaaatcttcacttcccatcattggaactgccaatggcgcttcttgaagaacattcgaaggaaaaactttctctagtccttctttgaccactcttgtcactgtttggtcaatttcattactacaacagccgttagtaaaatcaatggtcaccttcgcaccaaaggcttgaccgatagatgtggaaatttcgatcattcgtttcttaatttgttggcgaacctcttctttcaagctgcgcatcgtgcctttcatatatgcggaacttggaattacattcgatgaaccaggtgttccaccgacaaactcgccaattgtcaaaacaaagcgctcagctgaactgatttcacgagcagaaagggtctgtaatgcctcataaattttagtcgcgacattaatcggatcgattgaaacttccggcatcgaaccatgactaccaacaccttcaattttgatttcgaaccaatcggcactagccataaatgtacccgcaggtgcgacaaatactttttttaacggtaaatccttgaaaggaaagacgtggatcatcgctcctgcatcgaccttaggattctccaatattcttgcgtctaagcaatcctttgccccttgcaaaatctcttcgcctggttggaatagaagcttcactactcccggcagttccttttcacgttctttcaaaagcttcgctgcccctaatagcatggtcgtatgcatgtcatggccacaggcgtgcattgcgccattttcagaacgaaattccaagtcggtatcctctacaagcggaagcgcatccatatcgccacgcaataaaaagactctctcgccttgaccaatcgtacaggtgacccccatcttaccgcagctttgaggctcgtaaccatattctaccaatttctgccaaacaaaatcttttgtggctggcagttccattcccacttctggatttcgatgaaggtgtctgcgaatatctactaattctgtttgcaacgttgttttcttaatcatttctatcatgattccccctttaaaaaaatgatagcacaacaaagagggaagtaatttttttcttttttatattcaataaaaaaattgttttttcagtttcagtgatgtttaaaataaaaagaggcgtcaacttttgattgactcctcaataattcatttatttcacttttaatgtagctaattgttgttcgatgtcctcttcgccgacatctgccgctaataatgcgcaagcagtataggcactttcaaccatggctgtatcgaacaatgtcacctttttatctgtcatttcaatagccatttctagattcattttggcactgcctaaatcataaaaagccagcaattcatcggctgtgttttcttcgattgcttgtgagattcgctccattgatgtacctataccgccgtcttccaatccgccagcagttgtgatggggacatctttggcaacttcgccgatcaaacgtttcaaaccttcagggatttctttcgtatgagaaactaataccacacctctactcactgaaaacacctgcctcaatcattgactcaaagaaataagcggatgacattgcccctggatcaatatgaccaatcgaacgttccccgacatatgaggcacgccctttagttgccttgatatttttcgtttgttcaacgaggatttccagcgtagccgtgtttaatgtaccgttatttaaattatctacagccggtccccacagatctaacattgttttttcgccgacagtggaattcccgcgtttcataattccagcaatcgctgccctcagtaaaatttctggttcatttgactctttgctggccttcatcatttccatcatagctgtgccatagagagggcctgaagctccaccgactttgctgatcatcgccatcgcggccgctttaaagatatctggcaaatcgccagacaagtctgcagccatcaccgcatccatgcctcgagccatattgtttccatggtcaccatcaccgattggtgtatccagctcactcaaatagtctttcttgatttgaattttttcattgaataattctagtgtttttcgcaaattttctggtgtaaacataatgggcctccttattcgtacaaacctactaattttcctttagaaaaattagcagtatttctatgccaactaccttttgataagttttctcatccttttagcagaactggcagatttgaatactcttttgttcagcttatgatcattataaatcaaccagctcaattatttaaatataacctcttaaattaccacgcaattgtatgaacgggttcgttcaaaaagcgtaaccgttcgtcatctaatttgatcagggtgatcgatgcgccagccatttcaagggaagtcatataatttcctactttactgaaggtaagttcgatgccttcctcagcaaggatcgcttttgcatcgttaaacaaaataaacagctccatcaatggagtagcgcccattccgttgacgaataagccatatttatcgccggatttccaattgaattctcccttgatctttccgatgatttcttcagcaatttcttttgatcctttgattttttcacggcgataacctggttcgccatgaattcccacaccgaattccatttcatcttcagccaatacaaacccaggcttgccgacttctggaaccgttgcacccgataaggcaatcccgacagttttaatgtctttgactaactcttttccgtaactggctaattcagcaacagattttccttcacgggccataccaccgataattttatgcactaagactgttcctgcgacaccacgacgtccttgtgtataggtactatcttccacagcaatatcatcatctactaaaacagaatcaacttcgataccatccatttcagccaaatcttttgccatatcaaaattcatcacatcgcctgaatagtttttgacgatcattagtgtacctttacctttatcggttgccttaattgcttcatgaatttgatctggcgtcggtgaagtgaagacctgcccacaaaccgccgcacttagcataccatctccgacaaaacctgcatgtgaaggctcatgaccgcttcctccaccgctgactagcgccacttgatcgtaatcgtcacttcttgccacaacgagtgtttcgggaacttgctttacataatcaggataagcgcccactagtccgcttaccatttcttccacgacattctttggatcattgataatttttttcacttgctcttcctccttgtaaataactttatcctttataatcttatgaccgatcttctttaagtagcccataaataagtgtatcctgccaaagtggcgtgccgtcttgctgcttactgaaataaatattttttctcagatgtccttctttagtgaatgacaacttctctaataatctccatgacgcctgattttcaggatgacactctgcaaaaatccgatgtgctccttgtgcgaaaacttgatcaatcattgtgtaagctgcttcatacgcatagccttgatgttgataatcataatgaaaaacaaagcctaattcccagctgtcttccactacctcctcaagataaatgtttccaatcactttatcttcaagacaaaccgcccaaaattcgtccgattcgctatggctttttgctatctccttactctgctgctgattaatcggcccgtaaggctcatatttcactacgcgttcatccgagagatagtcccacaaatctggccaatcactaggcataaatttcctaattactaatcgtttggtttttatatttttcgtcttttccatactatacttgtcctaaatttaaagcatactagggtaatagaaaattctattaccccataaaatctacattggtaaaatcataaatagcaatgctgctaaaattccaccgatgattggtccagcgataggaaccaaggcatagccccaatcggagccacccttatttggaatcggcagaaacgcatgggcgattcgcggaccaagatctcgcgctggattgatcgcataacctgtcgtaccgccaagtgaaagaccgattactaaaatcaatatcccaaccgctattggatttaagccatcaccaaatttactcattccgaaagccaataaagcaaacactagcatgaaggttccgatgatttcactgatcaggttggcacctaagctgcgaatcgcaggtcctgttgcgaatacccctaaaattgtggcttgatcttttgtttccttccaatgcggatagtagtgaatgtatactaaaaccgcaccaataatagcaccgatcatttgtcctaaaatatatgggacaaccatatcccagccgattttcccagcaatggccattccaattgtgacagcaggattcaaatgggcaaatgacatataacctgcagcataagcaccgatagtaacagcggcgccccaccctaaggtaatcgcaatccagccggctccttctgcttttgtttttcgtaaactaacaccggctacaacaccatctcccaataatactaagaccatcgttccaataatttctccaattacctgcgttgacatactcgtgtccataaactcatcccctttaaatttttgttgctatatcagctgtaccgtaaattttttctctcattaaaatttagttgccagtacagctgatgtattcacttatttttctttaggctgatgtttatattgcatcgtcgcttgaactgcttcttgccagcctgcatatagatcgtctgtcacgtcttgatccatcgctggttcgtagcgttgaccgtcagaagcaaatttcttaatgtcatcaatatctttccaatagccgacagccaaacctgccagataagccacacctagagctgttgtttccagatatggcgcacgttctactggggtttgcaaaatatctgcttggaattgcagcaatagatcattttttgatgcgccgccatccacacgtaataatttaatatcagtaccagaatccttgttcattgtttttacaacatccgctgtttgataggctaatgattctaaggttgcacggatgaaatgctctttggttgttccgcgagttaatccgaagatcgctccacgtgcttgctggtcccaataaggagcaccaagtccagtaaaggctggaactacgtaaacattttcactgctgttaacgcgtttggcataatcttctgattgcggtgctttttggaacattcgtaaaccatcacgcaaccattggatcgcagaaccagcaacgaacacacttccttctaaggcgtaagttactttgccgtcaatgccataaccaatcgtcgttaataatccgttttcagaaagaattggttcttcccctgtattcatcacgatgaaagcgccggttccataggtatttttaaccatccctttatcaaaggccagctgtccaactaaggcagcttgctggtccccagccatacctgcgattggaaccttgttgccatagaaatgataatcagccgtataaccataaacctctgaatttgattttacttccggcaggatttctttcggaatgtctaacaagtctaaaatttcttgatcccatttcaggtcgtagatgttatacatcattgtccggctggcattggtgtaatcagagacatgaacttccccgcctgttaatttccaaactaaccaagtatcgattgttccgaatagtaattcaccatttcttgcccgttcgcgcgaaccttccacatgatccaagatccattttactttcgttgcagagaaataagaatcaatcaacagtccggttttcttttgaatcatgtcagagtgtccctgttcctttagctcatcagcaatgtcgcttgtttgcttcgattgccagactattgcgttataaataggatgtcccgtttctttttcccagatgaccgttgtttcacgttggttggtgatcccgattccttcgatttgatcgggttttaacccgccttcaattaatgagcctgcaataactgattgaaccgagttccaaatctcattcgcatcatgttctacccagcctggttttggaaaatgctgtgtgaattccttttgtgaagaacttacttccttccctgctttgtcgaaaacgattgccctgcttgacgttgttccttgatcgattgacatgatataagactccatgtttccactcctttttatattatatttagtgcttttttaaatccattaattgggtttccttgatctgttgatctagttctgattgatacgcttcttttgtagcagcgttccagtcgaagtagtcagccatagcatcaacgacagcgtctttgatttccattaagcgatggctgataaacagcatataattggttcgacgtaataagtaatctaccggcgtcagcgtcatctcttcttccattgcgtagcgtagtgacatcgattctgccaaggagagtccttcaaaggctccttgctccttcaatgcgaagactttttctgcattcgaaccatatagttctgcaataaatttggcctcttcggaacttaagccctgatcttcgccttttttggcaatagcttctaaggcttcatcgacatttttcgaatcgagttccccgccggatacaggataattttctgagtcaataagttcgaactgactgtccgataagagttcaataattttcttcatcgcccctgtcgccattaaacggtaatctgttagcttgccacctgatagaatcaataatccatcgtcagcgatggtcagatcactgccgcgagagactgctgaaggattgtcctttggctcttcctttgccgcatcggtgattgttttttcgacttctggacgagattgtttaccattggcataatcctcagccgcgttaataattttttcaaaattttcgtcactgattttttctttggttgtaccattataatcgccgccagcttcactaattaacggccgtaatcccgcccaagcagcctcgatgtcttcaattgtcagatttacctcaggatagcgacgattgacgattttcaacaaataatcaacatctgcctgttcgacagtcggatgattgtaatctccttgataatcagtatccgtcgtcccaaaatatgttttgctttctcttggaatgacaaagaccatccgtccatcattttctccagtgtcaaaataagtgggctgcggaactttcagcttctcaccatcaacgactagatgtacccctttggttggtcgcatatggggcttgtgatcaatttttttatccagcttattaaccaaatctgaccacggtccggcggtgttaattaccagcttgctattaacagtcagcgtattgtctgttagcctatctttgacttttactcctgaaacttttccttgatcatcatggacaatttcttcgaccttcattcggctgactgcaatcgcaccatcagctacggctcgtttaatgttctcgattactagccgagcgtcattattgcgataatccaaataaacgcctccgcctaataaaccctctgatgctaactggggttcccgttctaaaatttcttccttgctcaacatgtagttcgcatattttccgcctgtgatcccagctaaatgatcataaagatccatggctaccttgacggaaaatagattaaaagtagagcctggttcatcaaaaatcggcaaaatcattgggtccgctttcggaatatgcggagcaattccctgaataatcgctcgttcgctgactgtatcagcgactacttcgacatcaaaggtcttgagataacggaggcccccatgaaccagcttggtcgaccgagaagacgttccttcagcaaagtcttgcatttcaagtaatgccacagataatcctgaagccgctgcctgcagtgcaaccccagctccagtgattccgccgccaataattattaaatcaaacgccccctcctttaactgttgaatcatttggttccgctctttaaaagaaaacatactttacacctcactcttattcatgcaatatttttcttaaaaatggcgatttatcattacagaatcagtttatcacaatgaaaaacgctttcaaaagatttgaatcgcaacagcttgaaacatcaaatctgtcagcccttttcattttaaccggctatgaaaaaaagaatgttggaaataactcttcaatcatttatccctctactttcttttatgataccatgcgaagaaactactttcgttctttatttttgctctctttctaagatataattgcggtaaatgcagaataaaggggggaacggttatgaaaattttgattattgaagataatgaacagattgttgatgtcctgaagcgttatttgaacaaggaagaatatgaaaccgctgtgatacacgacggcaaagaagcactcccctattttgaaaaacattcggttgattttgtactattggatattatgctgcccaatgtcgacggctttacgatctgccagcagattcgcgaaaaatcgacggttccaatcattatgatcactgccaaatcagaagatgcggatcgtattttaggattggaggtaggcgcagatgattatattatcaaacctttttcacccaaggatgtcctatctaggatcaaagcaatcttacggcgcattcattttgaaaaagaaccgtctgtcaaccaattatctcttggttcgctccgtttatttctagaaaaacgccaagcaatcgttaaccaacaggaaatcaaattgaccaaaaaagaatttgaattgttggttcttttcgcaaaatatccgaataaggtatttacccgtgataatttactggatgcagtctggggctatgactattacggcgacagtcgtaccgttgacagccatatcaaacgtctgcgagcaaaattgaagaaagccggcgttaccgattgtcagatcgaaaccgtttggggcgaaggttatcgaattgaggtttgctcatgaaaaaaatcacgactcgtctgatccagcattttgtcgatctattattaatttttgccactatgattgctctgttctttggtgtactgtttgccaaacagactgaagacttgcatcaagaagaaatgacccatcgcagtaaactgatcagtgaaaccttaacggattatttcaactccaacacgaaaatgggacaaagcgtcggcatgggcggttatggagcctttttgcgctttctcaatcaaatcgctggtgaagaagtttgggtcttagatacagaaatgaacccggtcatgacctctcatcatgacaatgccagtctacagattgaaccgccaaatgaggcgaaaaagctagtcactgctaccttcgatacgaagaaaatgcaagtggcaaaaaaacgaaatctgtttcagctacaagaattaacgattgcaacacctgttatgaacaatgattccgttgcggctgtagtcctgatgcgttcaaaggttgatgtcattcatcaaaaccaaatgtccggctacttgatgctgctgttaagtctcgtaggtgcggtgattatcgcaagctttctggcttggcgtctttccaaacgattcgtcaaaccgatcgaaatgatgcggagctacgtaaacgagctggcaaatgaaaactacgaagaaaccttagcgatccaaacaaaagacgaactgcaggaattaggcgatcagttgactttgttgagccaacgactggcagaggctcgttcagcccgtgaccgcaaagagcagtcagaaaaggattttctttcgcaaatatcccacgaacttcggactccggtcatggtgatcaaaagctcgctagaggcgattactgacggttatttgagtacacaggaagaaaaagagtatctattgcagctattaaaggaaagcaataacttggaacgactgatcaacgatttactggaactaagcagattgcaatcaactgaatttcatctacagaaggatctcgttgatccattggattgtgtcaatgatgccctgcgtagctatcgattagttttgaaggaaaaaggccaagaaattcgcttagaaaatcacttgactgaaccacacatgatccatgcagattatttgcggatcacgcaagttattaaaattttgctggataatgcaacgaaatatgcgccggaatattcgctgattactgttgaaatagcggaaaaaacgaagatgttggagattgatataagtaacaagtggcataaaccggtcaagcgtccagaacagctttttgagtcctttcaacggcaaagcggtacaaatgtcaatgggactggtctaggattagccatcgctaagcaagtcattcgacgccatgaaggtcaaattacggcagaagtaattggcaatcaattcttggtcaaaattttattacccacttcataattgccatacttttgccacattctcctcctatactacaattgaaggaggagatcactcatgaagagtcataaaaagaaattggtatcagcttcattattatttgttggcatattaagcttcactacattaaaagcagacgctgttgcaacgaatcaagacgttcaaaatctgcgctactgtacgattaataacatttataaaacaccacgagcagagtgccctttgcgacaagatcatattctcaatcgtttagatgaagacgggactactagaccacaaaacggcaaacaagacgggaccggttcaagacgcgctaatcggccaagaatcgctgattgtccaaattacgcagcaaagcaaactcaagcaacttccgacccagcaactgaaccgactgcaacagctaataacacgcagccacaggatggcaccggaaatcaatacggccagcaaaataattatgattcagctcaagaaaccactagcatgaatcaacaaaccacccaatctcagcaagtccaacagccagcacagcaacaggaaactcagcaacaacccgtccaacaacagcaagtgcggcaacatcgggagtacacaaatcaaacgtcgcaaaacaatgtacccgtgcaacagcagaatcgtgtacatcataacaacatacagccgcaaacggggagtcatcacggccgtcaccattaaaaaaggagctgtgacaaaagacttggttctttctcaagtttggttataatcgagtagaggggaaagccaactgaccttccgcccctctcacaccaccgtacgtacggacccgtatacggcggttcaataagttgagtgtacgaactggtacttcaaggagatgtcctcatatccttggcgggccagttctttgtctgttaatgatcgatgaagaatatgacttttggagattgaccaaataccttttcttgtatttgaccattcatacgctttcgctttatcgatccctaaacgaatcagattttttcttttggttcttggatttttccattgtttccaaatatattgtctgattcttcgcttcaaccaaccgtttaactccctcatgaattctttcatctcaccaattccatagtagttgatccaaccagtcattagttgcttgatttcttttaaaataagttggatacttcttccacggtttcttttagtgagttgtttgagcttgcttttcacacgctgttttgcttttgcgtgagggcgaattttaatacctttctttgttggcagaatgcagaatccaagaaactttcgtttcaatgggcttcctaccgcactcttttctcgatttaccgtcaactttagttgttcttcgagaaattgaatggatttcttcatcacacgctgtcctgctcgtttgcttctaacatagatattgcagtaagtagcccaagggaacctcccccttaggccctctcagaaccggacgtgaacctctcagctcatccggctcccattatccagccgatggtaatattccaattttccaatgcgcgaataaatttctttctcgcttggcgatttcccctaaccaatgttccgcttttcttcgtgcttgtcgctttttatatttacgacgaacccacttcacgagacattggttgatgtagcgcagtagactgtacatttctgatttatagaatttcatgtaatagttcatccatccttgaattttactattgaacatattcgctaaatcctctagctttttgtccgcttttaattgtaatcgccaattccttacctctttgcgaatcgcctttttcgctttatctgatacagccggaagaaaatttgtgaagcattttccatatttattcttggcgcctctaggtctaaacgtaaagcccaggaaatcgaatgtcgttatcggatagttccccatcctatcactatctctgcagtaaacaatctttgtcttatcaggatgtaactccaaaccaaagattctaaaccgttcttccaatcttttcttcagatatttcgcttgctttagggatacacaatgagtaataccatcatcggcatatctagcccactgtatattaggaaattctttttccatgaagtcatcaaacgtataatgaagaaacaagttcgctagaactggactgattacaccaccttgcggtgtcccggcttttctcgaaacagtcgaaccatcttccctctggaaaggtgcttttaaccatctttccacatataggataatccacttctcttgagtgtacctttttaccatttcaattagatagtcatgtctgatattgtcaaatagtcctttaatatcaaattccagtacccaatctcttttccagcatctaactcttgttttctctattgcctggattgccgacttattcggccgatagccataagaatcctcataaaacaatcgttctactacaggttcaaaatacatcttcgctaccatctgtgcaatcctatcttcaactgttggaatcccaagtactctcagcccaccactctttttaggaatggatactgcctttaccggttttgggaaataacttcccgatgataatcgattccacagtttgtatagattatctttcagcttatattcataagcctcaattgattcttcatctactccaaaagttcctttattggcttttacttttagaaatgcttggtaaactgcttgttttgaaatattgtatgactttgtttcttgcataagttcctcctccttaaagttgacttatccttgaaactggataactcaggttcttcgctccactctcgttacaagagcttcttcactactacaacccaatctgcccccatgactgcatcggtactcttttcttgcggggcttccgcttgaaatactcccttgacatcagcccgtgggttcccacgttccatatagacgcctatgttatgttcatgccacctttatgccgcccgccgcctgatcagtaaacaggtttcctccaagctcatcctaggtcaacgactatacccagttttgacggaatttatacgctttcgacacttctgtgggtggttcgtatggtcactcatctccataacacacacctgacaactcttggttgccttttccttaacgctcaataccatagcttttgactacagcaccttaaggtggtttgaaacctccacctgtatggcggtttcggcaggccgtctgccatcatctatacagcatagctgctttgaatagtttatctattcacgcacactttcatggcgcacagtcatcggcgtatcgaacaaatttatgtcctagattttctagcacttgatcaaattcgttcaggtagatgttacttaacaagggagagagattgcctccttggggcgttccttcttccgttgttgtgatgagtccattttccattacaccactcattaagtattgacggatcagttttaggacttgtttgtcctttactttccgctcaatgaaatacatcagcttatcgtgatttacggtgtcaaagtaggctttcatatcaatgtccaccacatatcggtaaccttgttcataataagattttgctttctttactgcgtcatgtgcgctgcgatttgggcgaaacccataactattatctgagaattctggttcaaatagcggttgtaacacttgattgattgcctgttgaagcatacgatcgataaccgtgggaattcctagttttcttacaccgccgtttggtttcggtatttctactcgcaaaacaggctgaggtttatagttcccttggcgtaaattggatagtaattcctcgcggtgctctttcaagtaaggaagcagttgatcgacggtcatcccatctgcaccagccgcccccttatttctgactacttgaagatacgcttgattgagattattccgctctagaattctcccaaacagattttctacaccatcttgtttcctctgttcaccgcaagaagtgctgcgcacttcatcatacccttcgtgttccacactagctctttgatgatagccaagttttcttgttttctgcggtcgtcgcatcttctcacacctcctaaattattcaagattcttattgttcagtccttcgtaacggtcagtgtcgttactactatgacctcggctgacttctcatgattcaccatcatgtcgccatgatcgttgtgctggtttgttttcattcaacgcccacaacaccctcatgagatctcccccggtaagagtgaaaactttcctcccatgtaactgctagatttactgtataggtttcgggcagtattggactttgtcttgtgatgaagacttatccgacctaattcagccttgtatctagtttctgttcgtcagttcaggagtttgcgtccgacttccttcagccacagcctcacgattgccgccttgtctttcgctaacagttcctactgccaagcctgtagtggactttcaccaccaagttttcactcatgcagggcgcacatcacaaaaaagcaagtacattcgtacctgcttttttgtggctatttgtactgtttaggtatttctcgtcttatactatagttagaaagagggtctttagaatgaactacaccgaactaacccagtgctcttttttgttggatgaagaccattttatctatgatacctcggaagattctgaaacagtccatttgttcattaagtcaaaacctcatgaatgttcctgtcctacttgtggcacgttgtgtcgaaccttaactgcgacatatcaacgaacacttcaagatacgccaatccatggtaaacaaacatttcttcacgccaacctttacaaatatagttgctcaaatcccgactgctccagacaggtctttactgaagctcttccttttgcccgttcttctcaagttcgaaccgatgccctcaatacctttattttaggtgtggcaatctttttgagcaatgaatgtgctagtaaagtattggctctcttaggtgtctcagtgagcaatgataccattcaacgactgtatgatcgattgatattcgaagatcgaccaaatgtcgaagcaatagggatcgatgatgtagccataagaaaagggcagacctatgccacagctatctacgatatgcaagaccatcagctgcttgccctccttgagggacgaacagccgctacattaaaagaatggttagtccaccataaaaaaattcaattcgtagcccgcgatcgcgccaacgcctacgctaaagccattactgacatccttcccgattgtgtacaagtggctgatcgctttcatttacttcaaaatttgatcacgcatctaaaagaaatcttttcctcccagctcccccagacacttttcttccacgaaggtcgcttattagatcgagaacccaagaaggtttacgttgaaagaacaccagattcagtctacttagccaagttgtcttacgataattctgttccaagaaattcagatggttcagagatcgtttttgataataaaaaacgcgatctaagtagtccgcagtaccaaaaacaggcggaaagtcgccgagaaaaacaacagttgattcgtaccattcaaacgtattgggcagaaacagagaaaaaggatccttttcatttagcccatcaatttaacattcatccaatcacactaaagaaatatcttcaaatgacagaagaagacctctgtcagatgggtcagccgagaaactataaaaaacgaaaaacagttatggatgattacttaaatattattttcaaaataatgcaagatggtcacccggatgacattatttacttttatctccgatacagcgggtgtgataagaatcaaaagaccgtctggagttatattcaaactatcagtaaaaataatttctcgggtcgtaaatctatgcatagtaaccgattatttcggcaagtttatccagaagatgtacgaatgattagacgaaatcggctcttaaactatctactaaccgtgaatcctaaaacaaaaaaagagcatcagatcgaagaatatttaccagctatcaaagaaaaataccccattgtttctgagacagagaccatcttccgagagttccatacgattatcatgggggattctccagacgacctggatatttttattcacgcctatcaagattctccgattgattctttttgtcagagtataaaaagggatatcgccccgataaaaaacgcgatatcccatagtataagctctggattcgtcgaaggtaataacaacaaatttaagcttataaaacgaattgtatagggtcgttctggattagtcaatctatccaaaaaatgtctgttggctttttcggcaacccaagaagatttctccttgagcgatcttctttgaagggcctgtataaccaaacttgagaaagaaccaaagacttgtcatagcttctttttccgaataaacggtgttccagaagtagcttcttcggaaataagccgaaatttcacaaaaatttgaggaacaattttcggaaattccttcttatttcttgaagctgaccacttctgtcacaacctcatcttctattatataatcaccgatcttttcttgcccgtaatgcagataggatcgaaaccgtatcaatcacttcctgcagagccgctcctagcaatgctggaatcacaccagtacttgcaatcaacatcaaaatgacacatattacaatcccgatcagcacagattgacgagcaatttgcatcgtgtcctgagataagcggacagcggctgaaacacgactaagatcatccttcaagatcaccgcatcggcactttcactagctgcagtcgagccatgagcccccatggcgattccaatgtccgccacagcaagcgccggcgcatcgttaacgccatctcctaccatgattcctggacgatctgcgtcactcaaggctttgattacattaattttttcctccggcaagcattccgcatatacctcagaaattccaacttcctctgctatttgattggcaatcgattggtgatctcccgtcaacataatcgttttcgtaattcctagttgatttaattccttaatcgtttccctcgattctttacgaacaatatcagtaaatgtaatgtaccccacatagcaatcattgattgagatataaactgctgtcttctcactacttagctgagtggttgtaccaacaaatgaagcttttccaacacgaatatttttgtcattaacggttgcttgaattccttgaccagtaacttcctctaaatttgttactagcaacagaggaagcttctttgcctttgcataagccactagagagcgagctaaaatgtgactagattcttgctcaccactagccgcgtaagcaacaatgtcttcctttgtgaaatcctccgaagccacatatatctcttcaacagaaagtcttccttctgtcaaagtaccggttttatcaaaagcgatgctttttgctctcgccagcttttcaattgacgtgcccgttttcaccacaattccatttcgactggaacgactcatcccggcgactaaagccaccggtgcagccaaaatcaaaggacaaggagaagcaactactaatacttctgcaaaacgaacagggtcctttgagacgaaccaagcaatcccgccaataatatacgcgatgagcgtgaagggaaccgcataacgatctgccaatcggacaaaatgagcgggcttggcttcagactccttaactaattttaccaatgtctgatattggctatcttttgctgtctttgtaaccttgaagcgtaacgctgcatcgccgttgattgagcctgacatcagctcgtcatttagctctttttcgactggtttggattctcctgtcagtgaagactcgtcaacaaaagattccccagcgataacccgcccatcgactggaaccaattcgccaggtttaactaaaatcgtgtcgccaacttgaacctcctcaacctctatatcggttacttcttcttccttgacgcggtgagcgacctgcggcgaattatccaaaagagagcgtaactcacgacttgcttgatgactcgcataatcctctaaactatctccacctgttaacatgatcaataccatcaggcttgcccaatattcacccaccaacaaggtagcgataatagctgtgatagctaagatatcgactccgtattttccagagcgaagcgttttaaccataccaatcaacatagtaatcgccatgattcctccaacaatagcaaccagccaaaaggccaattgctcttgatgaaagccaaattccagaatcaacgcgacaattcctatcactacggttaacaaaaatttctttacattactcatgtctctacgcctccatctatcttcaatattagattagcaccgcaatcagctaattgaaaatagaacccattaaatgataacgattatcattaacagttcggaaaagacttattctactttagaattactataaataaaagtcttaaaaaattattcatttcactgcatttcccacctaataatcttgtttcttgttggcattttatcattgaaaaagcaatgacgagacggcaatataattgcctgatgtcattgcttactattaattattcggatcgatgatcgcgtaaacgataacccacgccaatttcagtgatcaaatactctggtttcaatgtatccttctcaatttttttacgaatattagacatatttactcgcaatgtttgtgaatcatcactatatggtccccagacctcggtcattagggtttggtaagtaacaactttgcctaattgtcgaaacatcaatgctagaattcgatactcatttttagttaaatgaatctctcttccatccttataaactaattgtttctcaaaatcgatctttaaggctttattttcgataactgagatagcctctgtctgaacattttgatggcgtaaagcggttcgaatgcgggccaacagttcatttgtgccaaatggctttgtcacatagtcatcagcacctaaatccaaggcttttactttttcctcctcgttgcttcgagcagaaataataataattggtaaatgcaggcgcttgcgcagaattttcagcagatcaattccatcaatatcaggtagacctaaatctaataaaactaaatcaatcgaagttgtttgaaaagcagttaatgcctccattcccgtacgagcaatcgttaattgataacgttcttggtctaagacaacctccataaaatctgtgatgttcgggtcatcttcaatcagtaaaatactagctttcataaaaattcctcacttcaaataaattctaacccgcgtcttgccttcaccaaccatcatttccatctttccattgtgggcatggatgattgtttttacgatactcaatccaatccccagcccattttttgaatccactggtacttcgcttgtactggataaatttgtttggattttttcaaattgttttaaggggatttcgccatcattttcgatctcgaagaccgtctgatcgtttttctgatacacagttagttttacaggttgcttttcttctccatgtcgaaaggcattttcaacgatgttgaataacgcttgttcaatcaaaataggatctgcttggataaaggttacttcagatggcaaagaaatctcgacctgtccttctggatagaccttttttaaatgctgatacaccgcttcaataatttcttctatgggttcagctgttttattcactttcatcgtatccatgttgatacgtgtgatggataagaggttttccaccattcggatcagccactgagattcatcttgaatatccgctagtaacttttgacgcgtagtctcttttaagtcagcgctattacttaacgtttcagcaatgccagaaataacagtcaatggcgttcgtaaatcatgggagactgctcgcaataggttgctgcggactttttctctttcattttccatttcaacccgctctttttcattcttcaattctgtttgttctaaaataacagcaagttgcgtcaaaactaactttaaataattgagctgattgttttctaaatcaagtccggcattacgctcgatccctaaaactgctaatgttcttccgcttgcgatgatgggtaaataaaatcctttagccccaatcagtgtatcggtgccgttgcctgcttccttttgatttttagctgtccagaaagcaacagcggcttcatccttggtgcttaaaatcgaaggtttcccactaatacaatgaacactttctacttttgcctgagaatcaaacaagattacttcacgttctagtaatctagataagtaagtcgctgaaatgtcgagaatttgattacgattgtcggccaagacatactgcttattcagctcgtaaagcaattccatttgatgttctttttccattgaattttctgcttgtttttttaaacgaaccattaaattactaattaggatcgcaactaaacacatgatcagcaaggtgattgggtatccttgcttgtagacagtcaaggaatacaaaggctccacgaaaaaccagttaaaggacaaaacacttaaaatcgaagcaagcgaactccaaaaataaccagatgtagttcttgcaaccaataaaatgaaaaatatataaatcagcatcagattttgatcaccaatatggatatactgcatcaattcggttacgattgtcgccaagaagactcctcccagcgcaatcaccaaatccttaccaccaccctcaataaccttacgtgttctaagaaagagggattgcttctcctccttaaagggaatcaaatgaagctccgtgtcatttaaacgtttcaacaagcggtcatcaaatgcctcaatgaaaattttctcataccaaggctggcggagattttttcccataatgatatctgtgacacccgtcatttttgcgaactcgacgattgtttcaaagctattatcctcttcaatactaattacttcagcacccagcttttctgctaagggtatattagtgggcgtattttcctgagtacgaacctgaatgaccgtccattctgctcctaaaccttgagctaaacgcgcggtccaacgaatcgatttttccgtcattttaggaaaggcatcattcactaccgttagtaatttgctttgaatcctaatcgttttagcactgattcgattgatatgatcagaagcacgttgtattgccagtccccgcagttgatctagcttttgaggaatgaaaaaattttgcaaagctcgcttcgcactttcactggcataaatttttccctgctctaaacgatcaatcagctcctctggctccacatcaaccactttgatggttgcctgctgcaaaaacgtatccggtacagtttctttaacctcgacgccagtgacctcctcaacgatatcattcaagctctcaatatgctgaacattgacagttgtgaatacgtcaattcccgcgtttaacaactcatctacatcctgatatcgtttacgatttcttgatccttcagcatttgtatgggccagctcatcgattaaaacaatctctggcttttgctggataatttgatcaatatccggttctgctaaaagcatttgcttataaagaatttttttaggggggatctgcggcaggccttccaataagcaattcgtatctgggcgatcatgaggttcgatatagccgacgataatatctttccccatcagcaataattcatgagcttccgaaagcatactataggttttaccgactcccgccgcaaaaccaaaaaacacgcgtaaacggccacgacgtccatcacccatttgctttttctccattttttccctccttcctatgcacaacaattctctaaccacctagctggttagagaacccattccaattatacatcaagtttatctaatgctaggttcaactgcaaaacattgacatattgtcgatcagaaaaccaatccttttgtactttttcatgaatgatcttttgaataactcgtttagacagtccgcgttcattagcgatacgagatacttgaaattcagctgctttcaagctgatatccggatcaacgccactagcagatgctgtgactagatcgttaggaacttttttctccgctggatttttcgctaattctgcttgggttcgtttttcaactaatcgtttttgttcattagaaactggcgacaattgactcacctgctgactgcgtcctgaaaaatatttatcctgttcaaagggttgtccaatcaaggttgatccaactacttgattatccttcgttagttggctgccattcgcttgatttgaaaaaagcaattggcccacgccagtaaccactaccgtatagaatccgccgaaaacaattaagctaaagatcagaaatcgtatactacctagaatacttctcctcattttttctgctccttctttataaaatgatcatcgaaagaatcaagtcgatgattttgataaaaataaatggggcaatgattccgcccaaaccgtaaatcagcaagttatggcgtagaatctgactcgctggtttttcctgatagctgaccccttttagtgccaaaggaatcagtgcaacgattaccaatgcattatagataacggcagataaaatcgctgtcaacggacttcctaatcccatgatatttagtcgatccagctggggataaatactatagaataaaactggaatcaccgcaaaatatttagcgatatcattggcaatactgaaggtcgttagagcgccgcgagtcatcaacaattgcttaccaatctgtacgacctgtaataatttggtcgggctggaatccaagtcaatcatattccccgcctctttagcagcttgagttcctgtattcatcgccaaagctacatccgcctgcgctagtgctggcgcatcattcgtgccatcacctgtcatggcgaccaaatggcctttttcttgataatcgcgaatcaagtccattttattttctggtgtggcttcagctagaaaatcatctactcctgcttctgccgcaattgccgctgctgtcaaaggattatcaccagtgatcataattgttttgatacccattttacgcatatctgcaaatttatcttttacaccgttttttacgatatcttttaaatagacgacacccattacccgattattttttactactactaaaggtgtcccgcctgcacgagcaattttatcaacaatctcgtcacattcagctggatactgttcaccgtttgactgaacgtatttttttatcgtatccgcggcgcctttacgaatctcatccccgcgatagtcaataccgctcattcgagtcttcgcactaaaatcaataaaagttacttcagattgttgaaatgctctttctcgcaaattaaagcgttccttcgctaaaatcacgatactgcgaccttctgccgtttcgtcggctaaagaagataattgtgctgcatcggcaagctgctcttcactgacaccattcaccggtaaaaattcgctggcgcgacgattcccaagcgttatggttcctgttttgtctagtagaagaacatccacgtcgccagcggcttcgatcgcacgaccactcatagcgatgacattttccttcgttaaacgactcatcccagcaatcccgatcgaggaaatcaacgcaccgatagttgtcggagctaaacagatcaataaggcaatgacaataatcatggataaggcttcacctttaccagataactgactgctaaagtctgtaaatggcactaaggtaatcgaaaccgttaaaaaaatgattgtcagagtaatcaagaaaatttgtagtccgatctcattgggtgttttttttcgttgggtcccttctaccatcgcgatcattttatccaagaaagattggccgttttctgaagttactcgaattactagatagtcagaaacaacagtggttccgcctgtcaccgcactgcggtcaccgccagattcacggataacgggagcagattcacctgtgatagcactctcatcgacagaagctgccccctcgattacatcgccgtcagccggaatctgttctccagcacgcacataaatcaaatcaccacgttttaaatcagaagatctcaactcggtaaaattctcttcttcaatatctgctaaactttgtattttataggtcataacctcctttttagcctgctttaaactatcagcctgtgcttttccgcgaccttctgccacagcttcagcgaaattggcaaaaagtaaggtcaaccatagaaagactgtgacagaaatactgaaccataacggcacatgcatcggataaaaacataacaccgtggtgatgatcgcgcctaaatagacaacgaacatcactggatttttgatttgttgacgagggtctagcttcttaaacgattgacccacagcccattgatagattttcttcattttcactcactccatctatttcatcgtaaaatattctgcaatcggacctaatgctaagactggaagaaagctcaatgcaccaatcactaaaataactataattagcatagatacaaacgttggactaacagtagataacgtacctgagcttaaagccgctttctttttgctgcccatattttctgctaagagcagaatagctatgattggcaggtatcttgaaacaagcattaacaaactacctaaaagattaataaatggcgtatcagctaataatccgccaaaagcactcccattattatttgctaatgaagtcgctccatacagcaattcactaaatgcatggggtccctgattcgtcagccatgttaatacttccggatgtaaaacgaataccattgttccaaacagcgtcagcatcaatggtgttaaaataacaatactagccatttttatatcaaaggcttcaattttcttccccaagtattccggcgtccgccccactaacaatccagcaataaaaactgccaacagtagaaatgccaacatgccataaagcccgctgccaacgccgccgaagatgatttctcctagctgcatcaagaacattggaatggctccgcccaatggcataaagctatccagcattgcatttactgaaccattggaagcagcagttgttcccacagaccataagcttgaccacccaacgccgaagcgaacttctttgccctccagattcgttgttccaagtacatgtgcaaattccggaccatagaactcactaaatgccacaccaataaaagccaacaataggaaaaatagtgaaacaatcatgattgttcgaccttgtttccagtccttaacccaaaaaccaaaagcaaagattaatgcggctggaatcaataaaattgccaaattttctaaaaagttcgagaaaattgtcggattctcaaacgggtaagctgagtttgcaccaaagaagccaccaccgttcgttccaagctgtttgatcgccacttgactagctactggtcctaaatgaagccagaggttttttccctctaatccctcataagaaatacctgattttaaagtttggacagttccttgagaaatcaatagaatcgcgaaaatgattgatagcggtaataaaatatagaccaaactgcgggtcaaatcctgccaaaaatttcccagaaccttctttttaacctgtgaaagtccccgaagcaatgcaactaagactgaaagtcccacacctgctgaaacaaaattctggacggttaatccaaacatctgcgaagtatttgataaggtcgtctctccagcatatgcctgccagttagtattcgttacaaaactaacagccgtgttcaatgctaacggcaacgataaatttttcacggatgaaccgccaggtataaagtgttgtgtcattaaaatgacgatcaacaatatgattgatgaaatacttaatagtaaaacacttgctccgtaacgctttgcggacatttcttttttactaattggtccgataactttataaaacaatcgctccaaaggttgaaggaatcgaacaccctttggaatcttaccttgcataatttctttgatataccagcctaacggtaacgccaatgctaataaaataaacaagaaaaataatccttgatagatgacactactcatatttcttcccccttaaataaaaaccagaaaagataaatcattaataagagtccaatgattcccaaaataatcgtcatttcatttctctccttattagccctacttctgttgtaacaaggcttactttctttactttttaagcataaaaaaaaagacctaaagatagtgtgaaacttgcgtccatttctttacactatctttatatggtcttttaaggtttcttttttaaaaggtggttacttgaaaatcttgatagaactctccttgatcaaaagtaaattttaatacggtgaaatctgacaagccttccccttgttcataataaatgtggtattgatcctgccaaaactcaattttatccgcttcttttgataacacctccatctttccaatcagcgatataccagtgaaatttttcgcatcataaaaatatacacaggcttttgaattagccaaaaattgttgaactttattcgatgaggtattcgtatgcaaatacaagcagttatcatcgatttttatcggctttagcatagcacgaatcattggatatccctcttcagtaatagaacctagaaaacacagttcttgtttatcaacgaatgcttgtaattccttttgagcgttcattcttatccaccccttttagattagtattccaaaacactaacaaaaatgtaagaaaatttatattaacccatcatcatttattattattgtcgtttttaacagaaaagttataaacaaaaacagaaaattcattttataccaaacttcttaatcatagcaaagcacgtcagttctaaattaccgacgtgctgcttagttattcttttaccgtataaatatcgctttctttggtctctctgaacatcataaagcacacaaacgagattaacaaaacgaacacgctgatcataagtaatgggagaaaaacattggttgtcgtatttctaaatactaatcccatcaccaactgacctagcggcaccgcacattgtgctaccgcgataatggttgccataaccttgcccaaatttgcttttggcgtgatcttttgaacaagtgagatcaggtagattgagattgcactcaacatcattccgataataatctccataataagaacaaccataaatcctatacttgcactggtcatactcaacaaaatattcgtaatcaccaagataattccctaataagtaaatacacgataaaaattgttaaacttcagatttttcgtcaacggtcctgctagaattgccccgacgatactagaaagactaaagacacccattccaataccatacattgtgtcattaacccgcagtgtcatccgtaaaataattggtaaaccaacaataaagaacgaggtcaagacaaaattgatcgccgcggcaatcacgattgatttgaaaatcacttgattatttttgacttctttaaacccatccttcagatcagcagttaatatttccataacagttcccgttgttcgttcacgtttttcaaagggaattttcaagaagctttcaacaatcgcagcaatcacaaaaaagacaatactgctggcaaccagcagcttcgcgcccatcaatccgtaaaatatcccgccaatgatcggtgctaccacattagacaattgtaaaattccatttgataatccattgattttctctagctcgtgttcttctaccaataacgggatactcgctcccacaactggtgtatcaaagctgccgacaatcgctaaaataaagatcaaaattccaatacctaagatagattctgaggttcctactactaagaataatagcgccgcgataatagcattggcgacatccattaacaccatcaaaatctttcgatcaaaacgatccgcaattgctccgccaatcggcgcaaacaaaaccggcacactagagattgctaagactgtggcaaacacatcagctcttcctgttacatccaaaacaaatagcgacaatgcaaagcgtaatatcgctccaccaaacacagagataaattgccccaacatcaaatagataatatttctcttattccctttcacactctctcctactctctttcattgatatgcttagcttaacgaattcttaaactttgagcatccgccttaagtctcattgttttatcctacttttagtcacttcttatgaaatcaatccataatgctttagcccttccaacacaccattctccgttttcgccacataagaagcctgggatttcaattgatctgtcccatctcgcattgctactccataatctaccagctgaaacatacttaaatcattattctgatcaccgaaggcataggtttctagttgtgtacctgacatcgaggacaagagcttttggatggcggttccttttgagaccgttttcggcaggacatcaatcgctaatggagcaaaacgaacggtatctgcaacggatgctaattctgcgcttatttttttctccagctcttcatttaaatagagattcataaaattaaccgggttcttatggaaaaaattaggcgagattggaatctcctgaattcccatataggcgatgtgctcttttacaacatccgataatcgattgactgcaaactcccgttgattaaagtaaccagccgctagacgattttccttggcaatcgctaaaattttctcaatttctgatgctgaaaattttgcgttctggattgttttgccggctaaacgtacatagcagccgttagataatacgaagtgctccgcctttagtagcgttaatagctcctttacttcataatagctgcgacccgttgcaatgattggcagtacctcattttctcttagctggtcaaaagcgtcgagcgtctcctgatccacccgcaggcttccccctgaacacaatgtcccgtctaaatcaaaaaaagctagtttcttcatgtttgtcatcctttcaaatactcttgatttatatgaatgcactaacaagcccatcagacaaaaaaatccgagaaaaaagtcagtgcattacaaatacactgaacctttcccctcggattttttatatcaataggtgccttttacagattagtaaaagatgaagccctcggtcacagtcctcattcgaatgagcggaaccctagttccagttttccagttcataagcaatcataccatttcttgaaagattgacgcaatatcaactttaagaaagctgtcttaacctttctaatacgctatctcaaattttgctgcataggacgaattcggagtctattcttgactattctaagaggctgatcacgctgttctctatttgataaaagttctgagatcgttaaaatcgctgcgctttttgaagttaaaacattttataaaaaatactagctgaagctcatttttttcgcatttgattaactgcttcaacaaaagacctaagcagcaaacacttcactgtttaggtctttagaattactcttttcttctataataaatggttccagcaatgataagaaccgctaagccaaccaccaagtaccatgagttgcgggtatcattggttttcggatagcttcctgttgttgttcctgaatcatgcttagaattgtttacttgatttgacgatttcggtacatcaactggtggtaatttcttattcacaaactctccaacattaacgattgctggtttattttcttcagctgattgaatcgtaaattctcgtttctctttgttgattgtatagccagctggagcttctttctccataaagtaatagtcgccaggcgaaagatttttgactaagagttgtccgtttttatcagaagtatattccccaacttgttttccatcagcatgatacagtctaaagactgctcctgccaagcgttttccttgatctgagacctttgtcattttgacgctgccctgataattgataaagtcttcaagcgtgatggtttcaggtttccctgaagctttgtcgctgatttcaaatgaaacgatctttttgttcaagataaaattctttggtgctttagtttcaacgagttcatatttcccaggagctaatcctgtcgcaaaaactttccctgttttatctgagataagcttttcaactgcttttcctgatgcattcatcaccgtttgaaccttgccgtcttcatcgcgaatctcgaactccgcaccttggagtgccttaccggcttcatccttcttcagccattcgattgagccctgataattgataaaatcacctaaatcaattggctctggttttcctgtttgttcgtgaatctcaaatggatgaggtttggtgtctaagacataaccctcaggtgctttggtttcaacaagtacatatttttgcgaggctttcccctctaggtcaattcctttaaagtagatttcaccgtttttatcagtaactacggttgttgtagattgaccttctcgatttgtgacagagaccggatctcctgttggctgatcctgatcatctgccttaaagatttgatattctgccccggctagagcttcttttgcttcattgattttccgaccaaatacttctacttgataattttcaaaatctagattgtcgattattggattttgatcatcgttttcctgaaccacaaaatagatgggttgatcattgaggatatatcccggtgctgctttggtttcaacaagcttataatttccggctccaagatctgaaatatcaagaatcccattttcaggcgtgatcacttttcgtacatgttgctcttcgccatcaacgattcggtaaagctcaaattctgcgcctgcaatcgaaccgccctcacccacttttgtgatttgcgcttttccgcggaaattctggaaatcaccgacatcaataatcgctggttttccatcggccgatttagatacttctactttgatcaaggctggattgataacatagtcagagccttcagtcacggctggtgctttcgtttcttgataatagtacgttcccggtgccaaatcctcaaaaagaacgttgccgtttttatcacttttagctgtttttaccacggttttcttatcatctttgtaaagagtgaactctgccccagataagccttccccatcggtattgcgtttcgttaattggatagaccctttgtagttaatgtagtcagctaactcaatgacttgaaccttgccgttatgcgacgatttcaccgtaaacgtgacttccttttcatttaagagataaccctctggtgctttcgtttcgaccagcgtgtaatttcctggcgctagttgatcgacatgaacttttccatcctcacctgatttaattggttccttgtttactttttgattcgcttcattgtataaatcaaactcggctcctgcaagcgccttgccttctttatctttcttcataaattcaacagaaccttgatagtttactaattctaaaggagaaccatttgattgcgtcgtcactgttttgggttttccgtgagcaacttcatctatcgtaaaagggacttccttattgttaagaatatagccttgtggtgctttggtttcgacaaatttgtagtctcctggtgcaagtcctattatggtgacttttccatctgcttgtgagaccaaaggctgtgaattcactttcttaccattactgtctaaaacatcaaactctgcgccttgcagcgggttgccttcgctatccgttttgattaattcagcagaaccttgataatttttatatttcacattgatcgtcggtatttgatggttgctgtttcgatagaccacgaaggttacaggatcattgttcaaaatatagccattgggtgactcaatctcggtaatccggtacagtcctagcggcaaactatcaatttctaaaatcccctcactatttaaacggtccggattcaattctactggttcccaaagcgcgtgattcggcatcaaattgctaaaatgttctagtttaaagcgagcaccttcttgaatgtctccgccaaatttgatggggtttccgtcagcgtcagtcttttgcaggatgactttgttgcgctcattcggaatcgtcatcactccggcattttcagttgaagtactgtcatcaatggtgattctccgaccttccgttaaatcggttgagatcgtaaagcctttcggtgcagctgtttcaattaataaatactcaccataaggaagattcccaaaaataagctgtccgttttcatcaacttcacctttacgcaacaattgagtttttgaggtattccaaagttcaaacttagtccctgctaaaggtgtttttccgtctgcttccgtcttttggatcaccagcttgccttttttaccagaggctgaaccgccgctatgattcagttctactgtgacatcttcgccatcaccaccggaaacagtctgctcattgtcgcctgttaccgtaattttgtttgaaacagtatctttacttccttcagaagaggaggtgatatagctgcggtattctagctgataagcggtatcgattttgtcattcagcttgatcgtcatggtttgtttgccagtgacattatctgtggtgacttctacggtataatccttgtttaatttcaacggtttatcataatttggcgtaatggtgccatcttctgcgacggttgtttcgtataattggatggaatcttgatcaattacctgattatcagagggttcatctttgatcaccacatgatcaagcgttgattgggaaggattgatcactgcatgccaattgacataatcaggattttcactatcctgttcgccggttttttgtgcatacttcccaccatatttcacgctgacctctccggtgacatcacgatcatcgtcattgttttcataatgtgcgacattggtgtattgattcgatccttcgacgattttcccttctacagaggtgtcaagttcgattagatacgtttcatctgagccttcaggaaaatcaatttgcagcatctgatcattggacgtgctaggttcaataatcttcttcatctcgtcatttacgacttcttcaggctgcttcttcgtaacggtgccatctttcttgacctcagccttgtaaatcttcaacgaaccatcaacgtaatcttgattttcttttatcttatcctgcaactgtgcgtgcgtcaggatattatgactgagattcactgcaatcgtccaagtaatatgcttcgtttgagcattatagatcccacttttttgagcgtttaattggaatggatcatgaggtttgaagtctttgtcgtcatcagaagtatgcttcccgccattttcatcttcccaatcagcctgcattttatttttaaaatgatctaactcaggattatttgggtccaataagctcacatcaaaattcgtccgatagttgatttctaattcggactccgttggattataatctcctttaaaaacgactttaaagcccatctcattctttcctgagctatcacttaataactcaagatcataatcttgtcctggtaccaatacacgattattcgttacatcacgaatttcaaaatccggctttaaatcttctttgatcgccattgatagacctggtattgcagaataggtatcggttaacactaggttttccatgtaatagtgatttttattgacattgatcttccagccaacttttttgtccgcgtaatcgatatctgtaatatttttgatcacgttttgttgctgcgccgttcctttgtcaccgtctgtttgtcccgtacctgtcgcaacattatttgttacttgagtaggatcggagacgatacagttcaccttggttttgtactcgactcgcaccgctccgtcgaaatcatttaaaaatttaatgacaaatccttcaccatcaggattgggctccaaaacataatcttttccttcaactaaagcttttcccttaacttcatttccttttttatcgaaggtgattggataaagcttgattgaatcgtcgataaggtccatatttttactgatggtgtccgtaatgatggcgtcacctttagcaatattcttctcgtcatagttgtatttgatcgcccagctgaattcctgattattgggatcatagccgaccatatttttttcaactggctttccgaatgtgtttgtcactgttgctttggcatcaattccgtcctcgtcatttttatcagtcaactgtgcgacgttggtaaaactgacctttccaccattttctggcttcgctgagtccttgatatctgtttgataaactaaacgataggctttgttggtctcacctaaaatcgtgacgttgccatttttatcaacagtatattcattcggactaagttctcgacctacttctttgatggtcccgtcgagattcatttctaattccattacttttacagatttatagtcaattccttcaggccatttttccgtaatcttaggatcttctaaatggttcgtggattgattaaagtcgactgtccactcgacactgctaggattaggtgtccgatcaaaatgtccctgcttgtcaatggattgctccgtatcaggacggatttcaacattgacaggcggcaaatcatcctccaccggatagtgaatggtgatatctccaggaccatcaatatgctcttttttgaattccgtatcaaagtaaaagctgccgttaatatcactttgattttttacctcttccgtaaattcaaaacgaatatttccgtcttgatcaatggtgtatttggcgtaaacttcgcctgcttcgtttttcagctcaccgacttgtgcctgcttaggcttcagttcttcaggtaatttgaaatcaaagtaatcgcctggttcgatttgctgacgcgcatcttctgggatattccaggtataaaacgcccgaacggttgtgttagatgtaaccggcggggtgacaacattgccatcctcatccaaataaactaaattcgagctagtcaaaatcgttccttcaccattcggaaaatactctcgaatatcggtagggccgtcagcccgcggcttagttttttcaattgcttctgactgagtggattctattgtcgctactgttgctgattcagtcgctttcgttggttctttcgatgaatcaggctctgtgttttctgttttgctttctgtttctgaagagctcgttgttatttcgtttgaactcgctgattcagatgtagtcgcttgttcaaacgtataggtcagctgctgttgctcataagaaatatccaaggaagatagcccttttatatccttaagatctacatgaatggttcctactccagcaacatctcctggaatgataagctcttgattgttctctatttttaacgctattgattttccagctatttctatagtcgcttgctgaatcactggttgagagagctgaactctgcgatcttcttgcccctcttctaatgtaagctgaacgttaagttgattcgcattctgtccttccgaaacattttcaagctttattgcaggtttatcctcggcgaacactgtcaaaggagtcagtgagttgatcaaaattaacaaggtcattaagccatatattaattggtcaattatttttttcgcttcattttcacacctcttacttcaaatttcttaaactgccatttctatttatagcagattattttttcagaaattttcaaaaatgaagctttcatagaacactttttgagagactaaattttttgtttttcctttgaaatcaaatctaaaacctgtgttaaacgatttagatcattgagctccaaacgtctgccaataactactagctgagcttgtggataaaccttttttaaatctttaaaggtacctgtagtcagtaaaatatccacttctttcgtgttagctgaaaaaacatcaataaatgtcacattgtacaaatagttaaagtgtccttgcagctgttcgatgtaatttttggtcatcagattgggcatatcgctttcgactaaaacggtaatgggcacttcatatttacacgggttttccaagtataaagcatttttcagataaggaatcattaaaaaagcgacttctaaaaagattggattttttgattctgcatacaattcttcaataaatcggcgcattttttctgtcattcgcggatagcgtttttggaaaattgctttgtacgtatttcctgtcatgtcggtattgaagcctttaaaatattgcgcaaaaaaatgactgcttagtatataatttcggaagcgtaaaaattctgcttctttaataggaaagaactcttcctgaaatcttctaatcatcaaatccgtcgctgaaaaaattggggtatgctgctgagcctgctgttgatacaaagcattgattaatggttccttaaaaacatcgatcgttttagacatggctaaccaaacgaggaaaaagaaaggaatctcagaatgcttcgtgttgattacaccttgaggtgaactaagctgcttttcaaaaataggatacaacgtattagaggtaatccttttttctaattctgtaggcatttggagaatattacccttacgagtacgaatgaccgcttctgcaaaaatataagccagctgctttttataggcataaggaatattgggataaacggtaaattcactatccaagatttcttcaacatatccctcaagcaattgctcattgataaaggtaaagggccaactgcttccacgataaatactccagaaaaaaatcaccatgatcatgcgaatctgatattcttctccctccaactgaaaagtatcacgactaattttaaccttataacgagataacatccggcgaaccttcgctaaatctcttctcactgtcgattcactggtaaagtgggcaagcgcataatggcgcacactttgaaactcatccataatcaatgtttttaaaagaacgactgtggaacatccttttacaatctctgttactaaattgtatacatctgcatctattgcaaccgtcagacgaaccccttttccttttgataattgcaaagaaaatttatctgaatgaaggtcagcaactttttcagctaaactattcattatgcttagcgtggttcgtttacttaaacctaaagcatcacttagccactctcgtgtaacccaatagccatttttctcattcaataataaaatcattcgccgctgaagaaaggtctctcgatcaaatagctcttcaaaataatctttttgtgttgttggcatctttatccctctttttttaaagaatcatctattttagaataagcaaaaagttaaaaaaagagtattacaatgctcaaaaaaaatcacggattactccgcgatttttgtgttaaggcatattcatccatgctggttcaaattgattgccgtccaaatcggtgacttccaaactaaacatttgatcctccggcatgttcatatccaccgagaaatagtctccaccattggcctttgctgcttccgcaatttttttcactacatcaggactctctacagaaaaagcggttaacgtactgctttctttttcagtgtctgcgatccttttatttttcaagaacagattataaaaatcatattctagtagcataatccaaaatgtatcatcccacttcatcgaactggactgctcattagagaactccacattcttcttaaatcctagtttctcataaaattcggtcgaagcttgcacatctttcactgggtaattggtaaataccattgctgccatctcgttcactcctttgaattttcgtctattatggaagaataacgaaattaaagcaaagaaagcgcttgtatttcagtgaacgaaatatattaatttttttcgtctaacagcaagaatcaagattacataaaaaacagtcatactcttttttgaatacaactgttttcttaagcttttttataacaaatctgcgatccattgataagctgcttcttttgatgacacagaatccagcatattgaaaaaatctggtcgatcaatcagtgccaccagttcagccagtgcagttaaatgttttttgctgtctaccgccgctagggtaaaaatatacttcattggtgttttccctaaaatttttatcggctccttaagtaccgttattcctaatcccacctctttcgctccatcttcaggacgagcatgaggcaacgcgacatgatcagaaataaccatgtaaggcccttcctcgtatgtcgtttggatgatcttgtcaatataacgtcggcttacgatttctgcttcgatcagcggtgtcgcggctacgtaaaaagcttcctcccagctatttgttgcaaggtttaactgaataaaagccggagagagaatatctgtaaggctgagctcatctttgtctgaaacacttggtagaatatcttctgaattatagattctaggctgcttcaaccgccttttcaattctttacgtaatccgatctcatcctttatagtcgtgaacctatcaataattgcaaaaagctcttcaaattgataatcccccgataagtttccaggaccgttttgaatctcttggaccaagttgtatttttcgtcaatcgtcataatcggattcactgtatagaccggctttttcaaagaatagagccgcatattaggtacagtagtgaaaatcatgtcataatcctgttttttctgatagatctcatttgtctctattggaccaataaaaatcatatctggaaaaagattctttaactcattgtaaataattgccgagcttccgataccattcggacaaacaataataccgacctttcgcttcacttggtattcatcattattatcaattaaagaagcaaaatggatggttaaaaaggagatttcctcatcaggaatcatcgttccgaatagattctcgattggcttcatcgtttccttaacgatttgaaataaatctgggtattcttgaataatttttttactcagaggattgataatcggaagatgaaaaaacaatcgatagtaagctggacgaaagtgactgtatacttgctttttcaccgttttcttatctttaaaacgaatacccgacaagcgttcaaaacgatcaaagattctttctactaattcattaatgatagaagaatctggcgcttcttcgtcagcatccccaatagccatgcccagcatccagccacaaatataaagtatggcgtatggattgtcgattgagaactttgcaagcaggcttcgagaaaagctatactccttcatttggtaaaacttctggaaattgtacctctcataaaactctgaccattctttggataaatgcggcaacaaaaaaatcagcatgtaactaaattccagcaatcgattttccaccaatacaatggaataatgttccaattctgcagcaatctgtcgaaagactttctccttctggattgtcccttcattaaataaaaaataatcccaaagaaagctgccattatctgaacgtaaatcctctagcaccatcttcattaattgatagcgcaagaccgattcatttccagccagatagtaaccctttttccgattatatttgatttgaatatcaagagattccaattctttttcgacttttttcaagtcattaataaaagtagtttttccaatatccaatacgcctaaaaaatgattcaccgataagtattcttcataatgatagaaaagcatcagataaatatatttttttcgttcctcaatatccatctcatagtatcgataaacatgatcgctagagaaaaaatcaacaaaaaacagacgacttgcttctgacaaatgatagttatttccatcaaagtagacaggaggatgcccttcatccgataaggattcattgattttagtgatgacgtaatcgacttgaacgcgtgacaaattaagctgacctgttaaatttctttgaggaataataggtttttcaatcatttttatcagtacttgccgtgttcgctgatcaattttgtacacatccattcctcctgtctaagtagattaacctgctgaaactttctgacgcaattgtttagcattttccgcgatttctgacttggttccttttgacaatagtgtcccgatccccatacagtcgacacctgcttcaagccaatcagatacattgtcaatggtgactccacctgaagaaagcacgggaacttgcggcatcggtgttttaatagtagaaacgacttttggaccaatgaaagatgaggtaggaaaggccttgatcatatctgcacccgcctcaagggcctccacgatttcggtcatcgatgtgcagcccggcatgtaagggatctgatagcgattacacaactttgccacgtctatgttgaaattaggagcaatgataaactcagctccttttaatagtgcttgacgagccgtctcgctgtcaagcacagttccagctccaatgactattttttcttggtaaatttcttttaattgttcgataatgtcaccagcattattattcgtatagctgatttctaaacaggaaatctttccttcaagacagccatcaacgatttcttgagcccgttcaattgtttctactcgaataatcgccattaatttttcttgatacagtcgagataacgtcgttaattttcgcattttagtttctccatcccttcaatttccttgtattttgatagtgtttcgcaaatttcagcgtcaaattttgacgaaactttacgaactggattttttggtgctcctacaggaaaaccgataagctctaaactatgcttaagaacactgggaacagtcgctaattttagaatacctcgaaaatcattgatgctttcttgaagaacttgagctcgctccattttattctcaagaaaagcctgataaattcctaaatcagtctttgttaatacattagatgtggcagccaccgctccatctactcccatctgcaaagctggtaaaatcaaggaatctgatcctatcaaaattgaaaaatcctctcgatcattcatctctaagtacatttgaatattttctaatttcccgctactgtccttaattccgataatttgcggaagctggattaattccttaaagacagattcatttattgatagttgggtatttgcaggaatattatagagaatcattggaagattggtatttaaggcaatcgtttgataatgctgaatcagctcttcatcgcttagtttgattagataaggagtgattaccgaaaccgcgtcgacacccagctctgcaaattgattggttactttaatcacttcttctgtagagatcccgccggagccagcaaaaacagggactcgaccagtagcttcatcaactacgatttctaccaacgctaacttttctgcttcgctaagcgcatagaattctccattagttccaaggacaaatagcccgtgaacaccatcattgatcagcttgtttactagcttacgtgtcgcagcttcgttaattccgtcctctgataatggggtcaccatcgccgtaataattcctttgattttcattagagtccaactttctttctatttttgattgattcgcctaaggcaccgcctggatgccactggtaatatttatctaaatctagttgttcttcttgttgtaataaaatagaaagacattgcaagacaatgatttcagcaataatcgaaattcttggcggcttgttcaaatcatcgccctcttgattcactcccgctaagagaaaaacggttgattggtctttcaaccaagaattttctcccccactaacaccgataattttggcctctaaacgtttcaaggattccactgtacgttttagttcttctgtttgtccgctgtttgaaatagcgattacgacatcgcccggcagtacttgtccggctgaaccatgaattgcctcgattgtatctaaatagtaggtcggtgttccgactgaagaattcagtgctgcaatatattccgccacatgactaggcttccctacgcctgttacgtgcacgcgcccatgctttcgttttgattctgaaatgacttcacaggcctccacgattttgcttttatccattcgtttgatgtattcgttaatttctggctgaagaacatcaatatatgcgtctaatttttttgtagtaatttccattcacttaccctcttttcttttttaaaacagacttagcggaatcccactaagtctgctcgttttacataccaaacagtgacaacaatttatctagcaagatgcccatcacgttatagtcgatattcgggaaggttgatccttcaatccccaatgtcccatataatgggtagagtaccgttggcaaaaaggccaataataagccaataacaaatgatcctactactgcgcctcgccagccaccagtagaatttccaaagacccctgctgttccgccagagaaaaagcagatatgagcagctgggatgatcactaccggaaacttgagcgcgaccattataaagacacctatcagtccagcggcatatgaagacaagaatccgacaataactgctgttggtgcaaatggaaatacagtcggtacatcaagagcgggacgagaattgggaataaacttctcagaaatcgaaacaaaagcagctgtgatttcccctaagaacatccgtacacctgtcatcaggatcgacatgccggcagcaaacgtaaaagcttgaacgaatgggaatactaaccagtgctgagaacccgcaagctcttccacagctggacgtccggcttttaacgcagaaacataaaataagatcaacataactgccgaaacacccattaagaaatcacggaaaaatgatagccatttaggaaaattaatatgctctgttgtttttctttgtgtttgctgaataatttgccaatatatccagataaagcatagccgatcatattaaaatgaccgatcgctgtcgcatcactatctgttatcttacgcataaaaggctgacacagctctggtaatgcagcagagaagaatcctaatagtaagcctccgatagcaattgccggtatatctgctacatgatgcgctttcaaaatcagtgaaagtacacaggcgaagaataaactatgccccgtagtgaaaaagatatttttaaatggagtgactcgagcaatcactaggttcatgatgaaaccgacaatcagcgtacagctagtaacaaatgcatactcggtttgagctaaggccgttgccgcttcgggagaggctacaaccccttgaatatgaaatccgctttggaatagttgattgaaattttgcagagcagcagtcatgatcgatccgcctgcgctgaagactagaaacccaataatcgttttgaatgtgcctgttaaaacctctgttccgcttttcttttgagcaacaagtccaataaatgcgacaaaccctaacatgaccgctggtgtacttaaaaagctgatcaaaaaatccattgtttatttccctcccataatcgtcttatcctaaatcggctaaaacggcttctaattttgttttgatctcatttttatcaacgatgtttccaatcccaataagcttatagggtaaatttttctgggctaattcttcggcaacgtctggcagcgtaataatcatttgtccgccaaatccttgaaccccatctagagaagaatgctctacctcaatggggaaattgttggctttgattacctctattactttgatttttaacattaaacttgaccctactcctgctcgacaggctactaacgctttatacataatgacgctctccttttatactgttaagtttttttataattagtttcgcgaaaactattttttgcttctgattcatttagtaaatagaaatcttcttttattcttttccaaaataattgatgaactcttgagtggaggataccttttctaaaaactgaataaactctttttgacttaacaactccgccagctttgacagcaattcaacgtgttcattgctttcttttgcactaagagggaaaagatattttacgggatcgttggtctcgtgtcccgaaataacaggacgcttcaatcgaacaaatcctaaacccagcttatttgcaccatctgctactggtgcatgaggcagcgcaatgtttttggtaattacgatatagggccctgttttttgatatatttgaacaactgactcgacatatccttttgtgactgttgctctttttactaaaggatcaaaggattttcttatcgcctcttcgaagttttcaacttctagatcaagctgaatatatgattcttcaatactttcatgcagcacttctttcacctctttatatatatttcctttacatctccactatatttgagagcgaatacatccgcaatgccgagtcggttcgctttatttttttaatggcataagaagtgaaccgtctgaataatttaacagcaaagaaatctgaaaaactgaattttcaatggcattcggtctctttgatcccattttggttcattattttattaaatgtccaaaaaaatcggtccaacttttacgataactgaatgatcacaaaaaagaccaactaatcattcattagttagtcctggttgtctaaattcaattattaagcttctctatgaaaaaataataaaatcttcttgatttgcttgattgatcatgattccttgaagcatttcctcatacatacgctgcaatgctggctgtttcaaaatgcgaaaaatcgaaatggcttgttcacagttttgtttccctgattttaaggaacctgagataatttttacccagccttggtaaaacagtaattttgtactatttaataaatccccctgatcgtggagcaatttctctgtttctaccagtacctcctttgcccacgtcagtttttgaaagttgataaaggtcgcacaggtaccaaacaataattcaaatttcatccgttgcatcagctgaactccaacctccttctctatccgtgagacagccgttcgcaataggtgatgtacggtctcaacgggaaagctgaattgaaaaaaacgaaagaggaggacttcaaaaacgccccaattctcaacattatataaatagttgactaccggttctgacagtgtctgtaattcgtcaaaaaaagcgttaagcttgattggttcctcttgctcacgccgatcattcaattgatagcacagacgtaataactggcatagcagttttaaaaatttttcgcctcggtttttttctgtgaacgtttgactcaattccctcatctgatgaatgcctttattgaaatcacgtgatgcattcacttcatcgttggatttgaagatctggtttaaatagaaggtaaattttcctgtcataaaaaatggctgctcagacaggtaatgataaagcttaggttctgctgcttgatcgcgcaaataaaggaattcctctaaggaaacattgatttgatccaataaatgctctaagcgatagaaactaatattcgaattttccttttcaaatttactgataaaagatacgctgttgacctcatcggcgacatcctgcagacgcaagccacggtctttgcgtaattgacgaaaaagcttcccatccatccttcttcctccttcataaatgtcattactaaattccactatagtagaattattagttagctacagtgtaaattatctatacttaatcaacaagactatttatttttttcacacgattcaagtagaacactaaagactatttcctaaatccatacaaacattatttgaggagtgattttatgagaagcgcaacgatggaagatctaccggaaattgtaaattttatttatgagcgattttcaaatttagagcattttaactttttaaccgagcatatggaccattcagaagaggttttgaagaaatttattgaaacagaacttctgctttttttaaagcatggaaaggttcaaatctatggtgaaccgattgtcggcatgatcagcagtattccatcgaaaaagctcactttgtttcgccagtttctgtactccttgccttctagaaaaatcttaaaggaacttcctgtggaggatcggagacggctcttaaaaaagaacaagctagtcgctgaaattcatcacacgcttccctggcataaaaaatataccaaaaacagctattatatcgctcagatcgcagtcgcaaaagaagccaaaggtactggtgtgatgcgcaagctgctgacaccgatctttgcagattgccaaagacagaatatggatattgtgctggagacaatgaccgaagcaaatgtcccaatttatgaacatttcggatttaaactagcggaaatccatcaaagtcagaatgttccttatgaggagtattgcttgattaaacgagctaagaaaaattagaaaaagaactggctcttcattgatagattaagagctagttcttttcgttatgcttaaatatttgctaacaacgggcactcgttttcctctgcaatgcccgctttttgcattttctgaactcttttacgataaatcaaaggagaaatatgatatttctgtttgaagcgcttactaaaataagcagaatcattatagccgcattgaaaagcaatagttgtaattgaaagattcgtttgatacaaaagaatcgccgccgttgttaagcgcaaatcattcaaatagtgactgtaggacaaatccgcagcctgaaaaactttttgcagtgttctgatcgagatctggcaataggacgcagtctgctctaacgttaaccccgcatcctgcaaatttctgcgcataaaatctgttgccactattaaaagttcattatagttttcactggctaaaaagggctccgcttctggcagccaatcacaaaaaagctgaacgaaatgctttaacagcacgcgattctcttcttcagaacaagaaacaaattgatccgcaagctgaaaaatcatttccaacaacacccgtcccattcctttttctgcactaataattcggctagacatcaaagtgggcagcagtctttttgtctgataatctttttgaataaatagattaatcccttcagtagttctttctctttgatatctgctggttgcctgcaaatcaaaaattccgatggtgtaatcctttaagatgctggtcttttctccattcgaatgacgttcaaatccctttttgataaagcgaaaacctatataatcattttgatcttttgagcgacgagtaaaaattccttgcgaacgatcgacaatactgtgggtcagcaccatgtgatccaattgataaattctagagacagacagtgtttctttgggactattaatcgtatattgaaagttcagttgagataaaccattcgaatagtcctgcgacttagaaaactgagaacaatggactcctcgttctgtcatcggctcttccgctcccctcgcgtaatagttatattcctcgggcgctaaaatcatagtgaacttcgtcagatattctatacttaaattatactatttgtataatatttcacaactccatttaaaaaaagcgctgccttgctgttttgtgcttcaataatgcagccaaaggatagaacgcttgaaaatagatccataaaaaagaaaaggaggaattattgtatgacgtcaaaatttgaaagtttgttttcccctttgaaaattggtcctgttgaaattcctaatcggatcgccatgatgcctatgggtgtcttttccccgcgcttgctgaatatggaaacaattgcttataccaaagaaggagccgattactacatcgaaagagccaaaggcggcacaggcttgatcattactggcttgatgccggtggtaaacaatatgggcttttgtattctaagtaatcctgaaggttatgtcagagatatgaaatatttaatggatggtgttcatgaagctggcgggaaagtatttgtccaactaacggcgttgactggtcgtgccaatcatggtttagtcggtatctgccctgctcctgcacccatccaaaacgtttgggacccgacaaaaaccgatcgtggcatgtcgaaagaagaaatcaaagaatatattgaaaactttgccaaaggagcaaaattggttcaagaggctggtggtgacggtgttgaaatccacgcggtccacgaaggctatctgctggatcaattcgcgatttccttctttaaccgacgcactgatgaatacggcggatcgttagaaaatcggctgcggatcatcagagaaatcgttgaagctatcaagggtgcctgcgggccggacttccctgtttcgatgcgttacagtgtgaaaagctatgtcaaagactttaaccgcggcgcgattccaggagaagaatttgaagaaaggggccgtgactacgaagaatctttcattgtggcaaaaaaattagaagaattcggctacgatatgctgaactgtgacaacggcagctatgactcctggttctgggctcatccgccaatgtatatgccaaaagcctgcaatttagaagatgtgatgaaggtcaaagaggtcgtttcgattccagtcgcttgtgccggcagatttgatgatccagcattagccgatcaggtaattgccgatggaaaactagatattatggggatgggacgtccattattggctgatccatatgcgcctgtgaaattctcccaaggtcgcttagacgatgtgcgcccatgtatttattgtcatcaaggctgcttgggaaggattttccaattcaaggatatctcctgtgcagtcaatccagcttgtggacgagaaaaaagctatgccttaactcctgctgcgaaaaagaaaaaaatcttagtcgttggcggcgggcttggtgggatggaagcggctcgcgttgcggcgattcgcggacacgccgttgatttgtatgaaaaaaccgaccagttaggcggtgtatttgttgctgcggcaacgcctgatttcaaagaggatgatcggcatttactggattggtacaagaaacaaatgaatgatctaatgataaatattcatctgaacagcgaggtttcacctgaacagacacaaacctatgatgaagtatttgttgccactggtgcaaatgaacgccggttagatactccaggctttgacagtgagcgcgtgacctacgctattgatgccttgcgctacaaagaaatcaacggagaaaacgtaatagtggtaggcggcggcttaaccggctgtgaaatcgcttatgatttagctaaaaaagggaaaaaggtcactatcatcgaagccagcgaaacaatcttgaatgcctttggtttatccgctgccaactacaatatgatgatggagctgttagattactaccaagtaactgttttgaaaaattcagttgttgataaatttgccgatggtacagcgtatgtaacagaaacagtcaaaaactatccaaatgtcgcaaatcgtgcgcagcacatgtttgctctcggtgttcaaggaatgccaaaggctcatgagattccagccgataacattattatttctgtcggctacactccagatgatgcgttatatcaagcaattcaggcagaccatgttcatttgattggtgacgcgaaaaaaccgacaaatgtaatggacgccatttgggaagcttatgaagcagcaatgaatgtgtaattaaacgttaaaagggaagctgcaatgacttcccttttaacatttatttttcgtttgttccagtttctgcgtaggctgtatttccaacttcttttactttgaacttcccatctttataaacgattttggtaacactggcattcgctagctgaccgccttctggagtttcctctgtcatatccgagatcattgataatatagacattccatgggcaacaacgagaacatttccgcctccatcttcggcagtttcctcagcaatttctgttagttccttttgcatccgttgtctaacaccgtcccactcttcagacatccccgatttatcgatttttttcaacgcactcagcatttctggaacagtggcttctccagaactgatagctttcatgaagtcttcatatgaattatagcctaattcttttccagcatctccccacatcacttcatcgtgttcgccttcataggacccaaaacaaacttctcgcaaatttttactttctttcacttgaagatcagattgtccattatttttaagcgctagtcttgcagtctcacgtgcacggccagcatcgcttgaatatgctgatttaaaggtaatcttcttttccttcaaccctttccctagttgttcggcaaccttcacaccgtcatcagtcaacggtgtatctgaccagccttgcgcccgatggaccgtattaaacatagtctttccatgacgtgtcacgtataacactacttcgtcagttttgtctgtactcgcatttgaaacgcttgtcttggctccactggtactacagccagtcagcatcaataaaatgatcgccaacaaactaaaaatccctttgaaattcttacgcatttcttttttctctccttacatggctaattgatttttatcactaatagtttccaatagaatgaatgtcccacttcttcccccttgtatattagagttagggttttaaccttccggttttgattggataaccctatgaaccatcgttattttaatttggtattaactcatttcttttgagataatatatttattggattgagaggctaagccgttccccccttgggtcattgaacccgcactcgagagactggctcctctctctgataagtggattgcgtatgagttagatgttgaaagtccttactttactccgtatctcgtacaaggtagtgacgcttttcagttgagtggatttcaatccaaaattctttttttgaaaggtcagatatacatgtactttttaggcattgatatcggtaaacgcactcacgttgcttctatcatgaacgaggaaggaaaggtattactaaaaggtttttcatttcctaacaccactgaaggagcagagtcattaattgagcgaatggtcgactattccggagcacccagtgactttgttatagggatggaagccacggggcactattggctgtccatcttttcataccttcacgaatcagattatttgattcacgttgtgaatccccttcaaacagacggatggcgtaaaggtacagaaatacggaaacgaaaaaacgatattattgattctgttttgattgctgacttaatgcgctatggctcatttgtcgaaacggtcttatccgatgaaaatgttttttctttgaaacaactttctcgttaccgaacttatttagtaggtacagcgagcgacttcaaaagaaaaattatagccgtattggatcaagtctttccagaatacgcgacgatttttaccaagcagggcgttttcggaaaagcttctaaagagttattgctggcgtttagtgccccgatcgacttagaaaacatttcctcagaaactttggcccaatacttagctgagttaagcaggaaccgaatcaaggcagaaaaagcggaccaattgaagcaagcagcttctaactcctttggagtaaaatttgctcaagaagcgttcaccttccaactacgttcaatgattgaacaattaaaattcattgaaagccaaataaaggaaacggaaagagaaatcaagcacataatggacactttaaattctgttattctcacaattcctggaattggtcctataaacggtgcgactattcttggtgagatcggagatattcaaaaattttctaacccgaaaaaactcgttgcttacgctgggatagacgcttccgtgacacaatcagggcaatatgaggcaacgcataatgttatgagtaaacgagggtctccatatttgcgaaaagccttgttttcggcggctttagtagcttctcaatgtgatcctgtttttagtgcgttttaccagaaaaaagtttccgaaggaaaacatcatctaactgccttaggtgcggtttctcgtaagctttgttacgtgattcatgctattttgactaaaaacgagccttatataattgtttctgattagctattgaacattcaaaaaaactaatggtaagaagcttatttgttgtacccttttttcggaattatctgttataaaatattttttgatttggctaatttttacttgactctatatagttagtctctccaaaaaagaaaacccgatgacagcacgacaaataagcgtacacatcatcaggtttagcttgcacatagacaatcactatccatcagaaattattaattaacacgaatttttcagcagtcctaaataagacctgagtaaaaactacgttaaatctgctccatttgtcgcaacgacttttttgtaccaatagaagctgtcctttcggctgcggtcaaaggtcccattgccctcatcatctttgtcaacataaatgaaaccataacgttttgacatttcacccgttccgccagaaaccaaatcaatacagccccatggtgtatagccgatcaaatcgacaccgtcctccactgctttgttcatttcttcaatgtgacgacgaatataatcaatccgataatcatcatgaatcgttccgtcttcctccactttgtccaccgctcctaatccattctccacgatcatcaatggaatttcataacgatcatataattcgttcaaggtaaagcgtaaaccaactggatcaatctgccagccccattcactggtttccagataattatttttcacaccgccaaacaggtttccgccaacgcggtcatcactttcttcaatgttggcagtcacacagctggtcatgtaataagagaaagtgtagtaatccaccgttcctgcttttaaaattgcctcatcgtccgcttcaaaggttacattgatgttgtgcttcttgaagtagctcttcatataatacggatattttcctttaacctgaacatcgccgcagaaccaattcagtttttttgaccagctcttgattggctaacgcatcttctggcttacaggtcagcggatacattgtcatataagccagcatacagccaatctgaaaatcaggattgatttcatgtcctactttgaccgctttagcactcgcaataaacatatgatgaagcgcttggaaccgacgctcttcattgtcttcttcgtctaagatccctaataaatttctaccacctaaaggcagcgtaccaaagttgatctcattgaaggttagccaatatttgaccttgtctttataacgttcaaacaacgtcgtcgcatacttcacaaaaaaatcaatcgtctgacgatttgcaaaaccgccatagttttcagccagcgcataaggcagctcaaaatgactgatcgtgactaatggctcgatcccatactttttacattcatcaaagaccttgtcgtaaaaagctaagcctgcttcatttggctcctgctcatctccttttggaaaaatccgtgaccaggcaatgcttaaacgaaagactttgaagcccatctccgcaaacaatgcgatgtcctctttataacgatggtaaaaatcaattccgtcatgacttggataataactatcttcttcaattgttggcgtcatcactcgatactgttttcttccgcctgaacgcatgtgatcctgaatactcgcaccctttccgtcaacatcccaggcaccttcacattgatttgcggccgttgccccgccccataaaaaatcttttggaaaagtcatttgtgcttcctcgtttcatttaaatttggtgtaattacagcctaaaaacgccaaaaacctgtcgacaaataagcgttcctcacgcttgatttatcaacaggtttagcttgctaaatgcaatcactatccatttgattattcttctaaaaagaattatagcacttcgcttttcaaaaatgcaaacgcttttttgctattagttattaaaaaaacgcttttgcatatcagccacctgctttttcagttcacaggcattggatttagccttttccaatgaatcaatcaggttatcgcaagcggtaataatgctgtcatctggatctaacgggttcaataatcgcttgatatcctgcttttcttgatcaatcgcattcagcatacgcagaatcgccgccaaagaatacttcgctgatcgtagggttcgaataatcttcaaacgcttgatatcctcaccatcatagacacgatagttatttttacttcttttaattgtcagcaatccgttacgctcccagtttcgcagagcctcagaagtaacgcctaaatactcggcagtttctcgacgtgtgaaacaaacagcatcttcttcagcttttccagccagaatatcttctactacatgaatcacgtcgtttgcattcgcgatctcctgatccaccaatttcaaatagcgatccaacagcgattgtgcttcggcaaaatcataacgagccacagccttgaccatatcaaccatcaaaattcgcagccctgattgcaggacttcaatctgaaaggcaacctgggcaattttgatcgtctcaatatgataatcggtaaacacacgatagccgttggcggctctaggaggaataggaatcagcccccattcctcgtagcggcgaatcgtgttaggatgcagcccgacaatagcggctacttcggaagtgcgataggttttcattgaaaatcctttccatcatttattaaaagcgttagctcatgcagagctctcgaacagctggtgtaaagcagtgtacttttttgtgtcagttgactcgaacggatatccggcaaaataacctgatcaaattccaaccctttggcaaattgtgtagtggttacgataatgccttccgcaatcttttttgtatttttttcaaagcgaatcagctgttcgtcgggaaaatcggcctcaagcctttctacttcctgccagttctgacaaattataccacaagatttgaacgtacttgctttaaaatcggccagcttttgcgcgagcatgttcttactatactcaagcacttcaacttccttgccgtgacgctgtaccggctgaatctcctcctcgtcaataaaacgtttggcgaaattcatgatctcaaagctagagcgataactagtctgaaacttcaataatcgtgattgtggcagatttttttgaacttctgctagaaaatttgaatcacttgcaatcaacgactgatgaatgtctccgcaaatcgttttcgggcacggaaacaggcgctcgagcgtcactaactgcagcaaggagtaatcctgcatctcatcaattactaaatgctgaatctgtttgttcggcttaatcccggcaatcattaatttgaagaataaatagggaaatagatccgaataattgatgcgatttttttcagacgcatgctccaagtgattcgtggctagaaagtgataataatccgacaaacttccgatagtattgagacgtttcttgaaaagctgttcgagcgttttggcaaaggattcacgacttatttctgaaacacgttcgcttaaaagcttcgtaatttcttgaatcagttcgacgagactcttttctgattgctgatcaacgaagcgtttgatttctgctgctgaaatatgataattgtcaagcttaatttctgctgaatacagtcgtgccttcaattgttcaagatgcgtttgaagcagctcgtagaattccctagactgcttatatttgtagttttcagcctgtttggaattgggattttctagtgctgccttcaattcgtcgtggcgatcggacacctgatatttttcttcaataaacatggtgcctaatttgacaatgtcaatttgcggcagctcttcttcacctaattctggcaaaactgttgcgatgtaatccgcgaatacttgattaggcgagacaatcagaatatcagaagcatccagctcctcttttttctgataaagcaaataggccatccgatgaagcgcgatagaagttttccctgatccggctaccccttgaataatcaaatttttagttttcgtgtctctgatcgcctgattctgttccttttgaatcgtgtgaatgatggttttcatttcattggaggtactcttccccagctctcgcatcagaagctcatcattgatggcatcatttgtatctactacaaagctgatcgcgccatttttaatttcaaattgtcgtttcaaacgtaattgaccgtaaaatttgcgttgatgggattcgtaataagcctcaccaagcgaaaaatcataataaagcgaagaaattggtgctcgccaatcatagatcagctgttctccatagcgatccgcaaagccataccgaccaatgtaaaagtcctctacctcctcttcgtcgtcaaattgaaatgcaattttactgaagtaaggagtctgcttttgataatttagtttctttaatacatttgcctccaaaacactacggctatcaagaaattttaaattttgctggtgattataaacctcatatttatctagctcatttttgtaatcaattgtataatgcttcaactctttataattgtcttcattggtgttcagggcagcctcaacctctgtgattttttgtttaagctggtgcgtcacttctgctaaatagttcttttcagtagtcgtgtccatctaatcctcccctttcatcagacctcatcttaacaaactccaatagggttggtgttatagtggagggtttgaaaataaaaaaacaccggaaaatagacttattggttaatgacaagtgattatatgataaataattaatgactgaatgaatggtataaattctaaaccattgttaaaacgcaccgcaggtcaataaaaaacagacctaaaatcgtcatagatctgcttcgcttcatttttaattaattgcctatcgaggtaaatacggatgcagaaaacatcggtggctacgggcatgatgagtagtcctataattatgaataaataattgattttaagctatttgtgctcctcttctaacagctacaaaattagacacgcaaataagcgatcactcaaccatgcgactcgccaatttattttttcttcgacttggatgaacaccaacgttggattattgattcctatgttttttgaagcgctctaacagttttcgttttgttttgttgatttttttcttttgttctatctgtgtactgttctttttagttgtagcatcaggcttagaggacgttttattttcggaagtctccacagattcggacgattcctttttttcactagtctcttcatagtatagttcctccaaaagagcttcttctggcaaaatatttgcaaacattgcctgcaattctttatcagacatagcggtaagatccagtcctcgtggtaaaacgacctctatttgtttgatcccatcaccggcttcttcggtaactttcatggttacaccttcttcgatatccgaaacgtcagcttgattccctgctggaatttgggcagactcctccgtggcatccattattccggctgttacatcgaaaatttgcttctcagtcgtttctacaaatttcgcgctaacaaccttttggaatagcttcactccatctttttcgaataagtttaatttagtcattttttctaataaggctttgatctcatcgacagatttattgggatcggtatttttgaatttccagcaatgattttttccttcactattttcaaatacgacaattaacaagcgcatcaatcgtgctcctctcaggctattctttttacaggtatttccggctaagcaataaagttacagttaaagctattttaaaagataagaatcgttccttttcatagcaaaacaatttctacagacttatattttctattgacaaataaaatttaataccaacctgcaaacgttgtcaacggcataatttttttatgtctactaataagagtgattcacaagtgaacaagagtgaactggagatgtcaatatgaaaatagagaaaaagaaaattttttttgattattagagttaaaaaaataagaaaatcattttcaaaaaaatgcgtactctaaaagctaattgcctattcttctggcttgttcattacaaacagtctaatcgttaccgttcattcgcaaaaaaaatgccgacacgaattcttcccttctgctgttacttggcgttgtatgacagcctattccctcggtttagtatgagtcctaaaaaaaataatgcgcttccagattcaatttgatactatttagataatgaacaattggagggctaaaatgataaagaaactatatttgatgcgccatggagaaacactatttaatgtcttaaaaaaagtccaaggtgcctgtgactcacccttaactgaaaaaggcatccaacaagcaaagctggcccgagatttttttcaagaaaatggcattaaatttgatcatctttacgcctctacccaagaaagagcgtgcgacacattagagattatttctgaaagtaaagaataccaacgactgaaagggcttaaggaaatgaatcatggattgtatgaaggagagccacaatttttacagccggatggcgccgaatacttcgaaaccttttattcgcaatttggtggagaatccctatcggctgtgcaaaagcgaatgaattctaccttgcaccacattatggcacttgacgatcatcagcaggtcttagctgtctcacataatggggcttgtgtcagctttttgcaaacacttcagcaggaaaacaaggatgagttgattcgggcttatccaaattgcgcaattttcatcttcaattatgtggataagcaattcgaattagtggatatcattgatccagtattaaaagtaagtatttataaatcgaaaaagcaacgattgatttgatcgctgcttttttatcattcaaaaagaaaatccatcgtcacagctcttgcttatgaataatcatcaagaaaagcgtggaaaacaggcctttttaaacatccgatgtactcattcaaaataattctttggtcgggactattttgagtgtagcataagtgacttttttaatttgttcagcttaattttacaatcggcgcctataaaaaataaatagatgtaaaatccatttcaaaaagcatagcccatctcttgccacacccaataaagaaattatcaacgtttatgctttttttaactcctttaagcttgcctttgttggtattcctcaacgattctttttgtgttcttgtttgttttgtgctttttgactttttgttgtttaattgcgaattccttgacttcttttttcctgaatcgcttcgcatcccgcggttatgcgtgcgatttcatcattgctttttctgatctaactcgtttcatgtcaaagagcttcagctgacttagtgcccatggttgttttgatatcccttttcctcctactacaatatatttataggttataaggtactactaatcccattagtaatcccttttatctatcatgttgcttaagctgttaaaatgagagggcaatggtcgggcatattcctccttggactttgcgtccgtgattaagtctgccaaccagctgctcattcacagcgttcgttttatgcaggttgaactgctgtttaccagtacgttcgtgtcacaccccagtagattgaatcggcaatgtgtttacgctggctttccattgcgacaaaactgaaggagctgattgtcttgaacgcagtaggtattgatgttgctaaaggtaaaagtgttgtttcgattctccgacctttcggtgaagtgatctctagtccctttgaactctgtcatacttctagtgccatcgacgacttcattcattctctttcaaacctagaaggagaagttagaatcgtcttggaatacactggacgctatcacgaacccattgctcgttggctctcggatgcggatttttatgtcagtgtggtcaatccaaaactcattaaagattttggaaacaattctcttcgtaaagtgaaatctgacaaaaaagatgcactcaaaattgctcgttacgctcttgacaactggaatgacctacgacagtattgctttatggacaagacaagagatcaactaaaaaccatgaaccgacagtttgatttttacatgaaacataagaccgctcttaaaaataatctcattgctcttttggatcaaacctttcctggagcgaatacttttttcaccagtcctgttcgaaaagatggcagccagaaatgggttgattttgtcgcctctttttggcacgtcgattgtgttcgcaaggtctctttgagtgtgttcactgaacgttatcggaagttctgtgtgcgtaaaggttacgacttccatccagataaaccagcgcaaattttcgaagcctctaaagagttgattgctcttttacctaaagacaaaatgaccaaaaacttaattatgcaagcaattgaacagttaaacactctttctaggactattgagcagttacgcctacagatggatcaaacagctgcacaattaccagaatatcctgtagttatggctatgaaaggtgtaggtccttctttaggtccacagatcatggcagagattggcgatgttcgccgcttttcacgtcgaggcgccttgactgcttttgcaggggttgatccaggtgtcaatcaatccagcacctataatcagaaaagtgtacgaacttctaaacgtggatctgctcaactgcgtaaatcactgtttcaagtaatggacgttttagtgaaaacatcacccgaaaatgatccagtttacgcatttctttctaagaaacgagcagaaggaaaaccgtactatgtttacatgactgctggtgcgaataagtttttgcgtatatattacggtcgagtaaaagagtatctggcttcactttcagaagaggaatgatttttgtttttgagagcataagttgaaaccagcgattatcggtggttctatttgtcataccttcaatccagatagctctttttccaattttttgcttgactttttatttgcaggcttaataaagcggtgattgatactgatatttttcccttctcataaacataataccccaaaaaaatcgactatcttatttcaaatggtgtattcaagtattcggaggaattagtaatgatgcaccctaaaaataacataattcgcttaaattcaaggctacaaaaaaactaccaagttctattatctagagtttggcagtttctcatttacacaacatatttttcttctttttcgattttttcatagtgcttttgttcatcatcatccgttataactactgttacatcattcagattataatatactgaaaaatctcttttcccaattttcgaatgatcaatcaataaaaagcgttcaacagaattattcagagcgatctgttgagtttggccctcttcaaaagtcgaagtcataattttctgttcatttaaagcattacagctgaaaaatgctttatgaaaattcatatcctgtagcgatttattcgtgatttcaccaacaaagcattgagtcgtttcccgcatctcgccacccaatagatagatttttcgattcccttttcgcttatttaattcttcaaaaacaggcaaacagtttgtaacaatccgcagtgaatccccttgaatgatttttgacatgagctcgattgtagttcctggtccaagaaatatcgtatcaccatcattgatcatttcattcgccttttccacaatccgctgcttttcttcttgcagcataatctgtttttctctatgagaaagctccacatgccgataaaaatccttcaatttcgctccgccatggacgcgttctaataatccttgtttctccatttcgtccaaatcacgtcggactgtcatatccgaaaccgaaaacttctccataatatcgctgactcgtactgtaccgttaacctctaataacgacatgattgcttggaatcgatccgtttttaacatttcatcgcctcttttctttttaagactatcaaattcttaagaaaagtgctagaacaagttttcttaagaaacctttcgcaggaaggaaagcaaaatttttcagaatttgcaagctgctattctaaaaacgccgattgtaaaattaagctagacaacttaaaaaagtcatttgtgctacactcaaaatagttccgaccaaagaattataaggagtgagtacaaatgacctatacccatcttacaacagacgaacttgttttgatagcatcttatttcaatatcgagaaacctgtcgctcttgtcgcacaaagtttaaatcgctctagacaaaccatttataatgtttattcgtttctcaaacaaggaaaaaaagtgctagattattaccgtcaatacaaacaaaataaatctcgttgtggacgacgttcaaccgttttatctgatgaacaatcaacatatgttcaagaaaaggtagctcaaggatggtcacccgatgtgattatcggccgtggcgagttcccaattgattgttctgttcgtacactctatcggatgtttaaaaaaggcctttttgacacacagtcgttacctatgaaggggaaacgtaaactaaataatcatcaagaaaagcgtggaaaacaggcctttcgcagaacgattcatgaacggaacagtctctatccacacctgactaaagaatttggtcatctcgaaggcgacaccattgtgggagttaaacacaagagcgctgttattacattggttgagtgtttatccaaggttattattactttgaaaccgacaggcagacgagccgaagatatcgaaaacaggttaaatgattggttcaaatccatgcctaaacacttgtttaaatccatgacatttgattgtggaaaagaattttccaactggcgatctataagtaactcgaacgatattgccatctttttcgcagatccaggaacaccttcgcaaagagggctaaatgagcactcaaacggcttgcttagacgagatggcttacctaaaacaatgaactttagggacacggatgaaacctttattcaatccgttgcctcgaaaagaaaccatattccaagaaaatcattgaattatcgaacaccattggaagtatttttgagctgcatagataaagacatattgtctagcttaatttgacaaatcagaaaaaataaaaccgaacgagcatgactatcatagtgacagccttgttcattcgacttttatctttaataaatcattttatttaatctgaagttattgcgcaagttcaaaaacaaagtagttaatgtctcctcgatatttcgaaatcgaatactcaacgggcagacgttctagcgaaaaaccctgtgtatggaaatagaacattggatctccttcttccacatctaacaaatcgctgatcgtatcatccgctttgattacttctagctttctggtgaccgttttaattggataacccatttcttcaaaaacttgatacattttttcttttgtaaaatcaaccttctggaactttggaaacaattcataaggaatatagctagtaactaatacgactggtttctcttccgcgtaccgtaaacgcgttaatttatagaccaagtctccttgctctaattctaagttttcagctacttcttcactagcagcaacttgttgaaaattcaaaacttttgtttttggaataattccttttcggctcatttccgaatcaaaactctcgatcacatgtgtaaattcttgctgaatcttagttttttttacaatcgttcctctttttttacgcttctccaaatatccttcatttaccagcgcctgaaccgcctgacgaactgtaggccgactaaccttgtactgttccgccaactccatttcagtaggaattaattgattttccacatattctccattttgaattttttccaataagtccattcgaatttttttgtgcaaagggatattcataagctacctactccttgattaattgtatccattataacatagttatattctccaatattttattggtgtagctaagacagcttcaaccgtttctggcaattcaaacatctcatcttttaataaaacaatactttgtccgacattgcaagtactgccggcaataacaatcgttccagcaattattgtaagtatacttgctatggaagaattattttctactatttgctttcctttcagatgctgaatcgtaaattccctttgacaaattgagtctcctaatgcaaacgaacacctttctacctgattttctggttgaagtgtttcgatggccttttcaacatgtagtttccttttctgtcctcgcatatctgtacgatcataatcataaaaacgataagtgatatctgttgcttgttgaatttcatagaccaatgatccctttgttaacgcgtgaatcgttccagacgggatataaatcacatcatgttctgcaactggatattttttcaaaattttcgtgtattcattctccttggctgctgctaaaacagctgattttctagggtcttgctgttcagcataaatccagcctgtttccggcggatcaataaaataccaggcttcactttttccataaggcagattctcaacggactgcgcgtattcatcagtaggatgtacctgaatactaagattctcatcgcaggctgtaaatgagataatcaaaggataaacctcacccgcctccaaaccaaatttttgaggattttctgcaaccatttctccaaatgttttctcttcatttactacgttacaatcaatatcagcaatcccacttgctgaataaacggacccaattttctcaatcttatggtcaccatgatattcgtgcaatctagctgtgccccaaattcgttctcgtgaggttggttctaaaatgtacatttttcattctcctttatttcattattctctaataaagaagacgtgcttcattcgaaacacgtccacttccttaaaatactccgataactacaccaattgctgaaataaccgtcaaaacgagtatgatttttgtagccgtcatttgttttgaagtcaataaataccaagccagtaagaccatcatcaaaggaagaacattaggaaaaattccatctaatactgtctgtagcttttgtacctcatctcccataggaattttaatcgctgtcgttagtgcaatattagaagcagccaagccaccaaccaccatgatccctaaaatattgaatgcatcagtgattcgtttcgcattttctcctattatgacgtcaatcgcatttacacctagccgataaccgttcataaagcataaatatgaaatgagcggaccgataatcccgtagcttataatataaaatatcggacctaaagcattgccacctgctgctaaccccataccaattgacagtaagattggtacaatgattccttgaataattgaatcccctattcccgccaatggtcccattaaggtcgttttaatatttacgggcatctcttcaggcacatctccaccaatagcgatttcttcttctaatgaagcaacgataccattgatcaattgacccgtctgaggttcagtattataaaacatcgaatgtcttaataataaccttcttttagcttcttcatcatttttataatacttttcagcaaacggcagataggaataggcccatgtatgagcctgtagtttttcatagctcatggaagataagtgagtaaagccccaacgtttccaaatctgacgtaattcttttttcgttaatcgattttccatccgttttttccctccttagaacaaatcgtcatcttcataagctgcttcattctgctcaattggcacattatttgcgggaacaagcttactatctccattgctttttcctgtactaaggtaaacaacgtaggcaaccattgctgccagaaatactaaagcaatcatgtttaatttggcgaaagccatcaaaacaaaacctgcgaaaaagaaaaccaaatgaaccttttctttgattacaattcccatcagcatcgcaatccctaaagcaggcaaaacaccgcctagcaccgaaatagtatcagttacaacctgcggaacattgtttaatagccaatccactaagccacgtccaaagaaaattgctgcaaaaatcggaactgctcgaagtaagaacgtcgtaatttgaggataaaccacatgattcagcaaaatgccgcgatcatcaatattttcagccgcactctgtgctcgcgtattccaaaatgaatatagagccattcgtgtattgtaaaatatgagtccaaaggtctgacctattaaaatcgctagagtaactgcaaccgctggttcccttgtagtagctaaggctaaaccaataccgccataggctgcataagtgatttcactattggttgcaccaccagttgataagtttgcaataaacacagcttgaacagctagtccgcataacacgcctgccttaatatcaccaaaagccatgcccactaaaaatcctgccaccagcggacgaccaactacataaaaaccaccactcattccaaataaccaaggactctcaattgcacctaagtaacaaaaaattccagttaataaagcgggtaaaaacaaactgccatccatcttttttcctcctttgattctttcatatctactaactcatcaatgaatcatactttgctttcataactttccaagattttggttcatcatctggtaatagctgaaatttaatttcaattccttgctgatccatataatcaaatgcttcataatctttttcgtcaatcgcaaccgttcttccaagaactttcgctccttcacgagtgttcatcggtccaacattcaatagtttgccaaaatcaactcccaatcgtactaactcagcaaatgtttgaggagaattgctgattagaaagaaatcttttgctgaatctcttcccttcggcacactttctatagcttgttcagtagtataaatacccaattttaaattccctgctgccgcttttagcactttttttcgtaaatcatcttttgcaatgtcatctcctactaccaaaattccttgaactgagcgtgcctttgtccatcgtgttgttgtttgcccgtgaattactcgatcatcaattcttgctaaagtaatcgtcataataaaatcctcctaattaaatattgaaaataattgctaaatctttttcttttgagatagctaaaactccaactcttcttctacgttttcttcctctaaaagtcccgttatccctttgcgaccttgttcaatcgctaattcttctaatgctgttaacgaactatttgataagctcagacccaactcaatcaccattggcaagttcattcctgccactactcgtacgcgcttttcatttgataggtaatacttttatgcctcgttataaggtgttccacctttgatatcggtcaaaatcaacacttcatccgaggcaaacttcgctaactggtcggtgagacgctctacaaaatcttgaattcccgcatcagtcaaactgaccgcaactatgtttttattctcgcctgcaatcatttgataactgtctaagattccattacaaaattctccgtgactcactatcaataatttcaatgatatttcctccttcgttttatgtaattacaaaatattttatgtaataactataattccataagtaagcgttgtcaactatttttttaacattgacaattcgttgtttatgttttaacatttgatatgtaaatacataaaaaggagagaataccatgaaaacttattctattgatcaacttgcacgctttatcgatcatacaaatctaaaaccaaatgctactaaagaagcaattcgtaccttatgtaaagaagctgaagactttcattttaaaatggtcgctattaatcaggtgcaagctaaactatgcagcgaactattaaaaaatactgacattaatattggagcagctatcagctttccattaggacagacaacgattgaagccaaagtagccgaaacagctgatgctatcaacactggagcaactgaaattgattacgttgtaaatattactgaagtaaaagaaaaaaattgggactatttaaaaactgaaatggaaaaaatcgtcactgtttgcagacaaaatagcgtaatctcaaaggttattttcgaaaatgcttatcttgaagaggacgaaaaaatcgctctgtgtaaaattgccaaagaagtaaaaccagattttatcaaaacttctacaggtttcgctcctagtggtgcaactctcgcagatgttaagttaatgaaaaaacatgtaggatcagaagtaaaagtcaaagcggctggtgggattcgagatgccgaaacatttaaacaaatgattgcttccggtgcagaacgcattggtacaagttcaggaattgctattattaatgcgttaaaaaaagaagccgtcaatggaactatttcgatataggagacactatgaaaaaaattgctattacaggagctaacggatacttagcatcattaatccaagctagcaatgaacacaaggttgaatttgttcctgtcactcgtagggatgtggatttttcacaacctgaagcagtcactcgctttttcgagaatttagaatttgatgctgtatttcatacggctgccctttctcaaacggcagactgtgaagcgcatccattagttgcccataagataaatacggagagcgccatcaatatcgcaaaaatctgccaacaaaaaaaggcacaattcatttttttaagtaccgagcaggttttcaacaatcggtctgaccaagaaccttacacagagaatactcctgtcaacagtgcatcagtctacggaaacaaaaaatagaagttgaaacctttctaattgaaaatcaaatcaacgcgataattcttcggctttcttggatgatgggactttcttatcccggaattaaaagtagcccgaaccttattaaaaatgtaatgaacgcaatgttgtatcaaaaaccaacaaaatttacagtcaatgaaattcgtggcattacctatgccaaaaacttagcggagcaatttgataaaattgtgaatttgccaaaaggtgtttatcacttttcaagcaaaaatgtgttcacaacctatgaagcagccaaacacattggtgcagcattaggctttgaaaaggctgtgatcgagcaattaattttgcctgatcatcagcgttacacagatcgcttccgaaatttacgtttagcaactaataaaatccaagctcaaggtatcgaaatttctactttcgaagaagatatcgacaactgcttaactgattttgactggaaaaaatgaaaatcagaaaagatctttcgcgaatagcgagatatcttttctgatttttaatcttcccaaaacaaaaaacctcgaacagaaaaggatttctccttttccattcaaggaatttctctaataatttaatctcctcctgcaaatatctcttcgcgattgtaaatcggattatgatcctttaaatcttcaatcgttcctacctgtttgccttttgaataataaccatctaatagacctaacgattggaaaatcgtttgtttataagcgatttctgcgttccactcagttgtatctagaatctgcagggctttatggatcgcttcgatgcccgtttctcctggcgcactgatcaaaacaccgtggctgtttagcagcagcatattaggcagctcaagcttttctttttccatgtagtcagagactaacccagctagttcgggagaacaattcggttcaaaatctaatactggaacgtaaccgattttttgggtcgcttcggttaaattcggcatatctaatccagctgttgcccaaaacattgaatttggtgcatgagcatgtaaaactgctttaatttctgggtttgtatcatacacagcttcatgtaaattgatttcacgtgtcagtttccctacaccatcaattatctttcgtgtatgtggttcaacgactagaatttgcgctggtgatacctcacctaaataagcttccgacatcattgtcggagtcataataatgtattcttttcctgtttgatccgttgttttgaatgaaaaattgccgcctgcgacattcgtattctttcgttcaaaaatcaatttcacgatccgcgctaaatcctcgcgctctctttcaaaaatcattcgtccatctgacatattcgagaccacctttttctattttttgaaaattcgtctactcgtaatagctgtttgagctgcatctctaacctgcaaagcttcttcatatctctttttccgacgttcgtcatattccttgaaaagaatcggattgccatatttataaacacagattgctaaaccaatagcgatagcgttaaagatcagcttctgggtcatgaaggccaggataaaactaacgatcgccagaaataatataagcagccatttcgttttttctttattctctcttttaatcatacctaccctccattcatagtcattaccctgtgacttttacaccgttgacttttttatctgtcaattcttcatatctttggctcggaacttttgctttggacatatatttatacaaccaaacaaacattgcgacaaaaataatcgtaccaacgatacctaaaatatttcctttgaaggcttccgcaaataaaattcgaaattccggtccttcaatggaagaccaggtaatctgctggcctttcttaattccttcaaccgcgccagttttgtccgctaaaccagttagaatcggtgtcaaatacgtagccgcgtacagataaatcggcatggagattacacccataattagcattctgactaggtttcctccagttaatagcaaaccacccacagcgattgaataattgataatgccggccaatggcagtacagcattccccggcaagatgattgcatagccaataaagactggtactaataaaattgcagtaacccaaatttcagagcgacctgctaggaccggccaatctaagccaatgtatacttcgcgatccttaaagcgctttttcatcatttctgacatagcatcagctaatggcgaaagcgactgcataaacatttttgagatcattgggaataaagccattgctgtggcaatttgaatggctaagttcagtgaaccagatacgccataggcggctgccagtccaagtcctaaaccaatgataaagcccatcacagaattctcagagaaaacaccgatttttttcttcaatgccttcgtatctgctcgtttattaaagaaaggaatcttatccatgatcacattgatcggtaacagcaataccgcagagatgttcattaaatgcgtaaccgtcactaatggaattcctgtcaggtcttcaatatgtcgttggaacatatctcccatcttcaattccaaaatcacttgagcaatcgccgtcgcaaatcccgctaacaagctcccgctgataaagtaaacaaggtaggcggttaatgccttgccccaaacattccacatatcaacgtttaatgttttcgtccaattcaaaagcaacatgacgaaattcacaccaagtaccacagcgaagaaaacaaacgcataggaccaagaccaagtaatactagcagcacctgtccagcctaaatctaaagccggtaaattaatcccggtatttttcgccaacgcttctgaagccgggcttaccgcattcgacataaagccgataaccattgacatcccagtaaaggcaatccctaaagtgatggctgacataaacgcttttttgaatttcattcctgcgaccaaccctaaaatcaagataatcaatggaacaaaaatggctgaacccagtcctaagatataattaataatgtcttgaaatattttcacgttttccacttctttccttaattaattctattgctactcgaccaacgctttaatatcatcataaatttgatctgcacccatacctgtcaaaaatggaataccaggaaaaaccttcacgcctaattcctcagccttttctaaaacctcgtcatccggctgcgcaacatagacataaattccggtagatggcagctcattttgaatggacttataatctaccgcttcaaccggaaaatcaatcccgtcatcttctaataaccccgcgattttactagcgatcgtttggctggttgccactccgcttccacatgcaacaattagtcttcttttcatcatgaattcctccagcttctataatttaatgaattgaaaccttatctaaatattttgggtaaacaaatgatggattttttgtttatcctcttcctgtataaatgctctgacaaactcttcgttcataaataattccataaatgcttgcagcagtccgacctgttctttgggatctttaataccaagaaagaacaaatttttcaccttcattaactgactatcacccatttgcttgacccttacttcatttttcaatcgcgcaatataaacaaatggtttctccacatactctggatctgaatgcggtaaggcaatatttaaatgctgtgtaatcaatcctgttggaaattttttttctctgctcgtaattccctttagatacccttcattaacaaaacccagattctttaaatgctctgcgacctgttcaaatacctgttcttcgttttcaccatcaatctctagaccgatcagctgcttgtcgaacatctttttatagtccacaaattttacgctcctttcaaatacaaaaactgaaattatttgtcaatctttgttaacatatgttttacaatgtaaatatacaatgcttcattctgtttgtcaacgcttacttaacattttatttcattctaaaacacgtttacgcaaattcaatttcatatttttaacaaactttaacacaactgaacatttttctcttgcattttccttctttaaatgctattaattaatgtataaacataaccgtgtatttcacggtttattgtaagagcttactattagaggtgatttcatgttaaaaaaagagcgtcaggaaaaaattttggatttgttaaatagaaacgactacttatccattccagaaatatcttcaagtttagacgtctccgatatgacgattcgaagagatatcaatgagcttgccgacaaatcgttgctagtaaaaatttacggtggcgcacaaaaacttgaaaaaattgaacaagaattgtccactcaagaaaaaatcgataccaatgtaccagaaaagaaatttatcggaaaagttatgaacagtattatttctgataatgacacgatctatattggtgctggaacgaccatgctccatgcactgccagaaattaaaaaagcaaacttattcatgattacaaatagtctgctagcatttaattatttgatttataatacagattatcgtgtcctattaacaggaggcgaattttcaaggacaactgaagaattttatggagaaatcgctgaaaagagctttgataatctaaatatcgatattgcttttgctgcaacgaatggtgtctttgacaataatgtcaccaccgcaaattctatcgagggttcaatccaacgagtggcctttgcccactctcggaaaaaatgcgtggtggctgacagctccaagtttaatcggtcggatgtttataccttctactccttatcggaagtcgattatttagtcaccgacaataaattgccggacacacagtttgactactacagctcctatacgaaaatcattaaggaggagcaagaatgatcctaacaattacgctcaacccctcaatggattacaactaccttgtttcttcattgaatttggatcaagtaaatcgggtcgaaaatccccacacgtcgattggcggaaaaggtatcaatgctggccgagtcatcgcacaatcaggtaaagaagtaattttgactggcatcctaggtggtcctgtcggaaaaatgattttggataccttaattgctgaggagcgttaccatcttgaatttttgactgttgaagggaattcacgaaatgcaatcacgatcatgcatgacggaaacactcacactgagctagtagaaaaaggtctctatctttccaaagaaaatgagcagctttttttcagacatattagtaatctcttaaaaacatacgcaatcgatgtaatttgtatttctgggtcagtcaattcggacgatgccaatttccactaccatttacttcactttatccgctcaatcgttggagagtctttcccgatcttgatggatatctctggtgaacagttggaaaattgtttaaaacagagaacagtacgaccaagctttattaaacccaacacccatgaattggaggaactgattggcagaaagattcagtcaatcaaagaactaattacaatcctgcacgatcctatttttgacaatgtcgaaaccattatgatctctcaaggtgaagatggagcacttgttaagcatgggactactatttatgatattcaaattcccaaggttgctgtcgtgaacacaacaggttgtggcgactctacagttggaggaatggcttatgctatcagtcaaggttattccattgaagattctctcagatatgcaatggcctgtggtatttctaattccttgttcgaaacaaatggaacaattgacaaaaatcaggtagataaatttattgatgacatccaattaacgaaaatcaaggaactaagtatcaatcgataatagcagaaaagggcacaccgatgtatgtttatggatcggtgtgccctttgattcgttcgattacttttccctcactgcaatccaaatttcactatagcagttctccaatccttcatcgaaattggtaaaagagatttctggcgcctgaactaattcacagtctgaagagggcaaccactctgaatagatttgtccccaagtctcctgaagtacttgaggaaatggccctttgttaggaaaaatcgcccatgtttgactggcaatagacaattgctttaggtcatcaaaaggattttcttgagtcgaagcgaaaccaataaaatgtgtcagttcccccttctcctccattcgctctttagcaaaatcataagatgcgttgatcacctgcttaggataaaggtctcctaactcatgcatctctgccctttgtttttctgtaattgactgagctaattcttggattgcattattcactcctgcaaactgcagcggtacctgctttgaaacaccaactaaattaaaagcgggtttttcttcgattttgaaattcattgaagttcctcctttaacatcaatataaaatgagtaccgaggaaaagttttttgctggtgacttttaatgacttctgaaggcaggtagcccgaccagtctcgaaacgctcgagaaaatccttcaactgattgataacgatacttaagtgcaacatccgttactgtttcacctcgaatcaaatctttattcgctagtgccagtcgacgatttttaatatattccactaaagaaatacctgcaataaaagaaaatgtccgtttcaaatgatattcagaaatcccaatcgtctttgcggcctctgccaatgaaagctcgtctgttagccgctcctcaatataatccatcaatcgattcaaatcttgaatcattcttatcccctcactcacacattgatcatacctaaaaaatcagctcaacacttgatacacctcagaccaataatatcgaatgaacatatcaaaataaaatccgatcacaaaataatgatcggatttgctatcgtaaagctgttaatagagcggttctaaatctggctcgccgttttctagaataagctgaaacggcccttcatgaacaaatggtctgcgtccgccgcgatagccctcatcagtgaaggtcataaagctttttacataactattcgccgtatcgacagtatatgagacacacaatccgtctttctctacccaatcaatcgaaaaaatcccgcctggatactcttcaatatgaattgtctcgacatctgttgctcctgcatcttcctctcggatagaggtccagcgtaactgattatccgccaaaaaatcaatacgaaattgcagcccggaatcaaagaatatttttgctattctaccctctagtggatgtttcttcatcaatgcaccttcctcgtaatatatattttgaagaaactttcattccttcaatcacccttaggggctattcctaatatgtttaaataaaataacgattactacttggatactgtaggatattcctgaataataagtcttggaaaggacttacgggaagacgctatcaccttctgcagttttactgcgacagaaagtctgtgacccgaaccgttggtataacctccaacacactagctgagtccattgacctctaccaatcctagtagagattgggtggcttagaggtttaatgaatgaaactctattatgcgaggctgtcgttagacaacgtgattctgggatatcccacagtacccaagcaatttccgaataatcaatgaaaggaggtccttccacatgaaactatttgtcggtttagacgttagttctgaaaaattagatgcttgctttatgacagacgattcaacttgctctgttttaaaagaagcatcttatggaaatagtcaacttggcgcaagccagatcaaagaatacattctcgaattttctcaaaaatttgagatagagagcttagtgattggaatggaggccacatctttatatagctttcatccagctatgttttttaaagaagatcttgagttaaatcaattgaaccttatggtttcagttgaacaaccaaataaaattaaaaagtatcgtgatatttttgaagaaaacaaaaacgatcaaattgatgctttttatatcgctgactattttcgcatccaaaggcaagtcaactccatcattaaagaggaagaataccttgccctccaacacttaactagaacgcgttatcagctaattaaacagctggttcgtacaaagcaacactttatcgaaaacatttattataaatgcaacacgctttctaaagaactaaaagcagaaggtggatccgttttaagtgccacattagtaactctaatgacggaagattacacaatggaccaacttgccgaactgtcattagaagagtttgcgaacctaattcaaaaactagggaagtatcgttttaaaaatcccgaaggaattgcaaaggcaatttctaaagccatacgtagttcctaccggttaggaaaagtccatcaggactctgtagatattgttttaggtgttctagccaaagaaattcgtagtcttgaaaagttaattaaagacttagacaaagccattgacgatttagtcgttgtgctacctgaatatcaatgtttaaccagtattccaggaatcggtcctgtttatgctgcgggtatactcgctgaaattggccctatcaatcgcttttcagatgaaagcaaattggctaaatatgccggtttatattggcgacagaaccaatcaggtaactctgagtatgaaaatactcctatggccaaacgaggcaatcgttatctccgttattatctagttgaagccaccaactccgtaaggagatacgagcctgagtaccatgcgtattataagaaaaaatacgctgaaacacccaagcataaacacaaacgagccatcgtactaaccgcaagaaaatttacgcgtctggtggatacgctactacgtaaccatcaactctatatgccaccaaggagcgtgatagataaataacagtatgttattgacgctaatccttggaagtacccgaaaaaatttttaattttggtcgggtttagttcagtgcgcttcaaaaattaactacctttaaaaatcttttgaaaaattatcttgacttattaccactagactatctaaacgttattttctactatctctaacatacaggttttaggaacaaattgcactgttttgttagaaaacagctttcatttttttccatttttgagataatacatgtaaatagacaagaaaggcaggaaaagagatggactctgctctggtattacgaatgaaagtggatcagaataaagaaatctctgattcattcgactatcttgatcactctgacatcattaaaaactacgctaaaatgactaagttgaaaccattaggaaaaatttttgctctaattggcttagctgaaatcccttatgcagagaaattaccgattactcaagaattgcttgcttttgtgaaccaaaacctgtccacatcggagggcttttcctttactggtaaattagaggaaatcgttccctgttataacgctatgcttttcgaggcttactgtcggctgggattaggaaaatctagcgaagcacaaaacgcgcttcaatggatcaaacaataccaagtatttgaccgtcagcagaaaactacttggccccacaaaggtatctgcaaatttggcggttgtatgatgagggttccctgttacatcggtattggaaaaaccatgcgagcgctactgacttaccaagaaaaagttgatccccacgacgaaaaagtcaacgctttgatcgagcaaggtgtcgattatatgctacagcacaatctctatcagcgattgtctactggtcaccccatcagcccgcatatcacggagagtatgttccctcaaagctatgttctttccttaacagatttgatgtatattattgaaaaaagccaatatacgactgatccgcgtgctcatgacctattacagctaatccaccagaaaaagaccaagactggtggttggaaaattgattatatctataagtacgctggttatttgcctttcgaaaaccgccgtaaagattctgaatggattacctacctctattctccaatcgaaaaaagcttgagaagtgaataaaatgcttctcaagcttttaatctgctaatacttactttcaaaatagttgtagatttcttcccagctatccattttcaattcataagactcatccgcattgtgatgtgctgcaaaaagaatgccttgtcctttaaatgtctttaagtgccgcgaatgatcatcaatcaaataatctgcagaaatgatagatttgtcaccgcaaaaaacgtagtgggtatctggaatgaatggaaaattcactcttaaccacccatactttgcattaaaggaagtcggaaaatccatcgcggctgtggtaatgaacagttcatgcttttctgataatttttccaacgcttctttggcgccttcaatcacaggcaaatcagaaaaatagtccgcatccagaatcatttctcgaatgttctccgtatgctcaggacgtatatcccgcaaatttatccctgccaaatcagatttagtataactagctccgtatttttcattgtacagttgcaaaagcttcgctgtaaaatcagcaataacctcatccatatcaattgcgattcgaaccattttatatcctcctagaattatcttttatcagtatattttctatgcggatcagcccataatatgacttaataaaagaaaatacaaaaaaatgggataaccaccctctcaatcaatatcatctatttttcttttagatcacacacttcgtttttttaaaagggtattttgcatgaactatgataaaacaaagaaaactgacttcaatcgaaaaagagtacccgattagacaataattcaaagttcctatagcttatccaaaatatctttaatatactggggctccacatccgttcgctccgccgtttcctcaatggtcaagccagaatcaatgaagcgtttgaccaccatactaattttctcagcgacctcaataatatgcttatccaaatcataaaaacgcactgctctttgtccccagctatgctcaataacaggatgaagataaacgatatcctctcttttttccaacaaatcaagaaaaacatcaatgtcatcgctttcaaaatataactcactagcattattctcaagaataatatctgattccttcttataaataaagtctgcccaactacctgtcgtctgtaaggataccccgccggtcaattgaacatggacaccagcatccaccattactttcaaaccaaaaacagaaagataaaaatcctttgccttttcaatatctttcactgcaatcaacgttccttgatagtccataatcttcctcctaaacctctttaataaaaaacagttccatcggctgttgataatcaggaactgaaagcaatagaccgcccgcatcttgataacctatttggcgataaaagtgctgtgcatcctcatccacctgcgtcgatgtcatcaatattttataacctaactgctgcatttcgttttcccaaaactccattaaaacctttccgaaccctagcccctgatacttctcagccacatgaagcatcgtacaaaacggatgctcatcccaaaatagattgtatctcaatagccccgctggcacaccatcaactaataaaacatacccttgtttatctcgaatcttttgtacgaattggttttccggcagatgacgatccaatgtgagccaaaaatctctgtcaatctcttggacataacgaatctgcatgaacagcctccctctcacttttctttcagtataacattttgcctagttgagacaatggtgaaagctgacacaggtttgatagtttacaagaattctttttttagcaagatgaaatttcaatggacgtggaaccttagcagaattcactaccactattgataagcggatagagtcctagctaataatattagaacggcttttcaaaaaaatacgcttcttttaactattcttggaacgctgtttttctttactttagaagcatacaaaattattgtatcaactgctatgatggtttcaaagaacagatttattgaaattcaatcgaatttttttgttgacctaaagttaactcgaggtagtatgttagtttcatacgaaaatatctgactctctttgtctaaatccatcaggaaagaggaataaaatgactaatttaaataaattaaccattattaaagagaaatctagtaatagtatcaccacccaattagttgctcgctttaaagagcttatggaaaaagaaacgatttccatccaaatggacgtcgtcgattatgatgaagaagcgatccagcagttatctggagatattctattattaagcctcccgcttatgcatgagcttcgttacctaaatcggctaaagacccgcttttactttgtttccttcattgatccctatgcatatgcacaaatagacgcaagaagattattgaagcaactgcgaatgattcagcagtttgagagcgaaaaaattagtaaatttcatccaaagagcagctggacttatgcggattatttcttcgccatgacacaaatgaaaaaagaagcaaccgcaattaaatgctgagtccattcccttgatagattcatcagcgtctagcctttaagagcaccagctatttgacctttcttcacttgtgctgtcgacatcattgtttctcagcatcacacaatccaattagacatcgtgctctatcaaatctaatcaagcttttttcgaatagttattttcaagtttggcatatttcttgttgacttagagtgtactcgaaggcataagctgaatatacaaaaagaaaaggggtgtatattgtgaaatcatctttatctcaatcgccaaaaaaagaggattatctaggcaagacttttatcattgagcaaaataatactgcgaaggagcggttcctttctaataacattgagtttattttacacttggccaccatttatctggttaaggaggagcaaactacggtcactgatagattgacagaagcgctcattcgagatcttatggacactactttgaaggtaagtatcgatcaaatcaatcaattagagccaacatccatattaaatacgatcagccacccagactattcgtggaatgcaatgagcctacaagactactcctctcttcaaaagatgtctagtgaacttagctactcttttaatatctcaaaaacagcggcattgagcattgtttggccaaattgggcccgtatggtttattgtaagcacgtagaacgctttgtattgttcgctaaaaatatcctatctgttgactctcacagaggagataaagaagctgctttgatggggattcatgaagttgaagctttttttcaaactcttcatttaccgacgactttagaagacttgggtattacctctactgatactgcatttgacgacctggctcaaaaaaatactaactcagatatttatacgctcctgaaatatttataggtttcctcagtctggtaaaatataggaaagggagtgaaaaagatgggctataaaatcagtgatatttcaaaaaaaactggactaagtgcctatacattgcgcttttacgatcaaaagggactattgcccttcgttgctcgcgataaacatggaaggcgtcattttaaggatgaggatttagcgtttctttcaattatcacttgtttgaaaaataccggaatgcaattaaatgacatcaaaaaatttgtcgaatggtcaatggatggtgatccaacctatgaaaaacggcttgatttttttactaagcataaaaaagaagtcgaaaaacagttggctcagacgcaagcctatttggacaaaattgatcgtaaaattgataaatacacccgacagcatgaatcagcatccaaaaaaaatttttaataatacaaacgagatttctgctctttcttttataagaagccgaaatctcgtttgtcatttgtagtaccttctttttaacttgctcttgattctgtcaacagatatttaaaaaccaataataatttttctatttcttgatagcagagattatccgatcttctaaaacaaatgcaccccttgctcatcaattttcacctgaaaacctcatagtgtatcaaccaacccaaaaatccatgatatatcccgtactctctcccttacaaccagcaagcgaattaatcattttgtcttttcatttgataattagttttaaatcagatataatttccaaataaaaactattcggggtgattatcatgtctgatttagaaactgcgttgatccagctacaatgtgagctagtcgctgaacgaaatctagtcaatcccaacggactttcatggctgcaatacgatattttaaatttgctgcggcaaaaaggcccggcctccccttcccaattgtccgaacagctgcacattcgcccgtcaaaattttccaaggtcattaaagaattaaagcaaaaagactacattacacaagcagtcaaccaagaagatggacgggggttattaaccagcctgactgaaacaggtctggattttcttcgaacagttgacgctggtcacacgtttctctacaaaactgccgctcagaatttctcttcagaagaacagcagctttttacccaattagcgaataaactgatccttgctcttgaagaagaaaggtcgcgaaaacaatgacgacaacaatcaatatcttaggcgccagaaacaacaacctacaaaatgtttctgttactatcccaaaaggaaaaatcacagtagttacaggactttctggttcaggaaaatcatctttagtttttgacactttagcagctgaatcacagcgattgctgaatgagacttactcaagctatgttcagcaaatgctcccccactatgtacgccctatcgtagataaaattgaaaatctcccgatctcgatcgtaatagatcagaaaaaaattggcggaaatatccgctcaactgtggggaccactactgatatttatacttccctgcgtttactttattcacgaatcgctcagccttttattggttattctatgatctattcttttaatcatccagctggcatgtgtcaaagctgtcagggaacgggtgaaagtttaacctttgatttgaataaactgattgattttgatcgttccctcgctgaaggcgccatctgctttcctactttccaaccaggcggctggcgcttgactcggtataccgaatccggttatttcgacaatcataaaaaaataaaagacttctcttctgctgagttggaaaagttgctttacgataaaggcagtaaaccggcgaatgcgaccgataaattccctaaaacgggcctttataccggagtaattaatcgtattcaaaagaccgtaattgaaaaaggcgcgaaacaataccaaaaggatatcgatcgagtgaccacatccgtagtgtgtcctgagtgtcaaggtacacgggtgaacgcgcttgttcgttcggcgacaatcaacgatttatccatcgctgattgtgttaacatgccgattcaagatctactagcttttttagacactgttcatgataagcaggttgctaccattttaattgatttgaagaaccgtctgaaaacgatgatatctgttggcttagactatttaactcttggaagaaccaccagtactctttccggaggagaatcccaaaggctaaaaatgacgaaacatctaaatagttcactcgccgatgtgttgtatattttcgatgaacccagtgttggtctgcatcctgaagatattattggaattagcaagattttttcacgtttaaaagaaaaaggtaatactgtcgttttggtcgaccacgatccagatattatcaaaatggctgatttcatcattgatttaggacccggtgcaggttcaaagggcggccaaatcacctttcaaggaagttataccaaatttttaaatactgacacgttaaccgcacaatcgttaaatgaacctcatcagtttaaactgcacaagaaagactattcagagttttatagtttggaagatgtcagtgccttcaacatcaagaatcaatcagtccagcttcctaaaggagcactaacggtggtttctggtttagcgggttctggaaaaagtacgttgattcgaaaactttttatggaaaaatatccagaagcaattgccttcgatcagacacctatccgtggaagcaatcgttcgaatttattgacttatcttggaatgtttgatgttatccgccaagaatatgcgaaattttcgggaaaaccagcttctctatttactttcaacggcgctggcgcttgccctgaatgtaagggcaaaggctatatcaactatgacttagcttacatgggggatgttcggcaagaatgcgaaaaatgtcacggaacaagatacaacgaggaagcattgtcctatagttggaaaggctacaatattgacgaactttttcaactaacagtcgccgaagctaatgaactaattgctattcctgaaatcagaaacacgctagaggttctagttgaagctaatttggcctatattcccttgggacaaagtctagatactttatcaggtggagaacgacaacgtttaaaaatcgcaacgatgctactgcaaaaggactcgttagcttcaacaatttttatcttagatgaacctagtactggactgcatgaaagtgatattaaaagtttactaaagcttttagacaagttaaaagaaattggcaaaaccctaatcgttttagaacataatttatcgatgattagtcaggccgattgggttattgatatgggtccacgcggtggtatgaacggtggagaaattctgtttcagggctatttaccagagcttttagagtgtaagaaatcttataccgccaaacatttgaagaattttattgatgaataaaggaagtgatgattgagagcactcaaccatcgcttcctttatttttctagtgaatagtaggttattgaaatattcttagtacctttgactactaattccttctgattctcttctggatagtagttcgcagtcagaaccctctccccatgattgataaatatttcgcaggtcgactggtctacaaaaatggagagtctcatcgcttcacttggagctactaaactttctcggatttcaccgaacgcgggattcaatggatagtgagtgtttctgcgatccaattgaagcttcccctcttcagtatcatagctcaaaatcagagcatacatatctgttttatctgaaaataaatgaatctctccatggctatttttaggaatcgttagctgtaactcataacaattattagtcgtctttcgtaactgctctgtcagttctaaaataaaggtttcctttgtttttcttaattgcttcgtttcagctacaggatattgatagagctttcccttttttagcgttagctctttgatcaaactcaaactgtgtgcccagccctcgttaaaggttggatagtccatttctggtaatccgatccagccaacactcaagcaacgtccatccggcgcattgaacgcttgcgtcgcatataaatcaaaaccttcgtctagcaactgttgctgaagtggatgttctagtcgattttcttctattatataatcctcagccaaaatatacgtatttggataaacattttgatattctaatacactcttgtccatgccttgtggacaaagcagcagcgccaccttgccatcaataaaaagcagattaggacattctaccataaaacctaaatcttgattgagcgctaatgggcctcggtatgtccaatcaattaaattttgactacggtaaatcagaatgttgcctttttcgtcattcgtttgtccaccaatcaccatcagatactcatcttcgtattgaatgatctgagggtcgcgaaaatgcgcagtgtagccaagaggaggagctgaaatcaatggtatttctagcttagtgaccgttccattgttattcatccaagcacctaattggtaactatgacgttcccaggtctcatctctaacatttccggtataggctaaaaaaagtttttcttctaccggaatggcacttcctgaataaacaccatgagaatcgtacaccgaatccggctctaacgccggaccttctacttcccaatgaaccaaatcttttgaggtgatatgaaaccaagattttaacccatggatggcaccgaagggaaacgattgataaaacaaatgccattttccattagagtaactaaatccattagggtcatttaataatcctgtctctggctgaacatgatagttcaatcgccattttgaagcagtgaccttcctttttaaatccttgacatattcctcagaccattcttgatatgggcgataacgtgccgcttgtgtccatttcatcgtattcacctatgatcctaaaattggtaacacataatcctgattgtattccaatcctgaaatggcttcttttgaatcggtgataatcaccatcacagttgcatcttttcctttaacttcgatctggtttagatcaatcgttccgattacttgtccttgttgcagtgtttctccttctttaatagtcaatgtgaagggttcgccatttaaatcaaccgtatcgattcctaaatgaagcagcagttccatcccatcatcggcaactattccgatcgcatgttttgttggtgcaatcatttttactatacccgatataggtgccttgattgttccatcacttggtaagaccgcaaagccttcccccatcattttactggcgaaaacctgatcatccacttcagaaattggaataatttcaccttcgatgggtgaatacactttcccattcgtctttttagcttgtgcgtttgaagcaacagcgtccttctcttttttaataacaaataaattcgttaacgcaaaggccagaataaaggtaccgatgcctactaacacatatgtgatcacttggtaaggctcatagatatacatcagtggtgataatagaaccgctaatccatagctgttggcttgaattcccaataaagataacaccatgccaccgactgcggagcttcctaacatgactaatatcgctttcattcctgttcgcatcaccacaccgaacagcgcaggttcactaacacccagcatttgagtaaccgtggccgaaatcccagccgttttcacagaagtattacgcgttcttaaggcaattgctaaacaaaccgccgcattggcaaaaccatacatcgcacaaaccgtaatcaatggattgaagccggttgtcgctattaaagaagtttcgatcatgataaacatatggtgcatccccgtcatgacggcaattggatataagaagccaatgatcaaaccgccgattcctaatggcagatgcaggaacatttcaattacttttaccgcctgtccttcaaaggcatgaacgattgggcctaggacgaataaagcaacaaagacagagattaggattactagaaatggcgtgaaaatcaaatccatcgcattgggcatgttttttcgtaattttttctctaacgtggcgccaatcattccagtgatcaaggcagtcaggatcgagcctttatagccaactaacggaattacaccgaaagccataattggttcagcggttccacctgcaactgcataagcattaggtaaagccggagaaaccagcatcaatccgatcaaaaagccaatgatcggtaatccgcctaattttttaaacgcagaccagcagataaaagcggttaaaaagccaaaagccgtatcggttaaaatcgtcactgacgcactcaaccattcgggaatactattcggcgtcagtcccattacacgaagaacggtttcattgaagagcacgccctttagtcctaagaagagacctgtcgctcccagaattgggatgattggaacaaagatatccgcaatattccgaacagctcgctgcaacggcgaagcttcgtcttttgctatttgatctttcgaaatttcattgaaagagtaagtcttttgtagcgcagcataaaccttattgacaatccctgtacctaaaataatttgatattgtcctgcattatagaaaacacctttgacctcttccacctgctctacttgactgtcatcgattgctttacggtcttttacttgcaggcgcaagcgggtcgcgcagtgtgtagcagagacgatattatcctctcctacaactgcgacaagtttttcagctatttcttgataatttgttttagtcatgattgccaccctttctgattacaacggcttgataaggttttaaaatttttgcatgattctgttctgtcaattctggataattgtttaataaaacttcaccaacggcttcaattatttgttcttgattgcttagattgacaaaaatttgaagcgtctcttctcctgatcgctcgtaaccaataacggcatcggcggtttccagtggcgtaaattggccatagatcaatgcattacgatagactgaacggtttcgcaattgaatcatttgttgataataggagaagattgactctggtcgttgtacctgatccgctgcgttcacttcgatctgatcccctgtcagcttcaaccaagttttgttcgatttactaaaaccagcattttctgaagcgtcccattgaaacggcgtacgcgtattatctctagaacgatgatttacaaaattcatggcctcctcttcggaaaagccttccataatcgaacgatgataattatcaatactagagacatcattgaagtcttcaattgattctcgttgaaaattcttcatcccgatttcctgcccttgatagataaacggggttcctcgtaaaaagaagaaaagagtccctaaggctttcgccccaatctcattttgatacgtttcatcggtaatgtattttgataatgaacggggctggtcatgattttctaaaaagttcgcgccccatccgctattttgaatcgctgtttgacttttgaacaataatttcttcaaatccttcggctcccaatttgtgcgacggaaccattcgctgccgttttctacatcaatgtcggcataatggaaatcaaagatcatattgaagtagccatcttcaccaatatattgatcgtattggtcataaggcacaccgggtgcttccccaacactgacgcattcatacttttggaaagtctcgcggttcaattccgctaagaacgtttcaattccgggacgatttcgtgttttgtgcttcacactgcttaagccatcgctgccgtcaatcggcgcatttccgtaatcctgatccttcttaatgaacgtgatcgaatcaattcgaaaaccggcaatccccttttccaaccaccagttgatcatttcgtagatttcttgtctcagcgctggattttcccagttcagatccggctgcttcttatcaaaggtgtggaaatagtacatattctcctcgttttggacaggctcccagacactgccaccgaagatcgagcgccagttgtttggcggatttcccgcttcacctgatttgaaaatatagtaatcacgataaggactgttggaatccgtcaaagctgtctggaaccatgcatgttcatctgaagaatgattcacaactaaatccagaattaacttgatgccttttccttttgcggcttggatcaattccgttagatcctccatcgtaccaaattctgcctgtatacctttataatcagctatatcgtagccattatcaaccattggcgaggtaaaaatcggacaaatccacagcatggtcaccccaaggttcgataaatagtctagcttctgcgtaattcctttgatatcaccaatcccatcgccgtcactatcgtaaaaacttttcgggtaaatctgatagaccacttcttctttccaaaagctttgttcttcggataatatcttttctttgttcaaaacggtttccatcttacgttgctccttttgtggtatcgataccatatttattttaagaaaaacctgcttatgcagattttcgttcgattaattttaatactaattcagatgtatccactcgataatctttttcttccattcgagcaatcaaccaattcgttgcttcacgccccaaagcctcaatcggctgtgcgatggttgtcaaaggtaccgccagcatcccagtgaatggttgattatcaaaacccatgattgccaaatcctctggtacctgttttccctgttccaaataccgctgcaaaataccgctggctacttcatcactactggtgaataccgcattaggacggttttcctcaggcaaagccaacagcttatccgccacctgcttaccatcttcaatcgtgtgcacttgcttaaaaatccagtcaattttcatcggtagttggtgctcatttaaagcccgttcaaatccttcagtccgagaattcccatgtcccccgcgggttaatgtacctcccgtacaataagcgatttttttatagcctttattaatcaaatactcagtcgcttcaaaactcgctgcttcttggttcgtgaatacctgaggcagatcagatcctggtatctcctcattacataaaacaatcggaccatattcgcgatacgcttcaatattttttggatcgccttcgatcgagcacataatcaaaccagctatcacttgctgtttcagcatttccagcatatttgtttcagctttcttatcatcataggtctgcataaccagaacgttatacccgtgtgatcgtgcactcttttcgatcgaatcaaccaagtgtgaaaagaacgggttagcaatccgtgacacaaggataccaatcattgtccctttttttgatctcagttgagtcgctactgaactaggagtataatccaattccgccatcgctgcttgaattcgtttgcgtttgtcttcagaaatgtagggatgatgattcaagtatcgagaaactgttgacacagataaccctgctttttttgcgacatccttaatagttgccaataactcaccgccttgtggtatcgatttcacaattatcatacgatgaatatttttgattgtcaataggatttattaaagaaataattttatcaaccttagaacgatccgtttaaaaagaaccgttgaatatttaatcaacggttcttcgcgattcgctcagttagttctttcaaaaatggttcatagtcaacttttgaaaaatcggtcacatcaaactcgatcaagctgcctaattgaaaattgttatagtctcgagttttaatgatttcatagaaagcatctttcgtaatcaaattatctgccttgcttcgatccaccaactggtcaccaaaatgataatgcgtcataatgtggctcaaatgacgatcaggctcaatatcacgaagctttctgcgttcccaaagtacatcgaaatcagcaaccaatcggatagtgattggttcatagttgtattgattggctaaagcactcagctgatccttttgcttctcgctaaagggatattcggaaacaacgatccgtttcccagcacccatatacaaggccaaagcactgtaataaaatgcccaaacctttttttctagttccttcttctcatccagattatcaaaaccgatttgatctgcgaaaatttcttttccttcatctggtgtgatcagaaaaaaatctcctagtgcatgccgcatttcattaattaaataagattttccagttgctggacttcctgcgatcaaaatcaaatacttcttcatgttatttttgcatcgccaagggactatcaacgttcatgaatagtccgattttatgcttaacgatttctttgaccgcttgatttgcaggaatgacgttatggcgcagtgatttgtttacttcggtttcgctaaaggactcttttgcgacttttgtccaattaactagcaattcggttcctacattgaattttcggattccattattgattaattctggataatcctcttcttttaccccggttccgccatgaatgactaatggtatgtccacaacggcatgaatctcttttaatagtggaatatttacttcggtctttgatttaaattgtccgtggttcgttccgattgcaattgccagggcatcgatacctgtttgcttaacaaattctaccgcatccgcaggttttgtataaactttatcattttcagctacagagattccttcctctgttccgccgatggtccctaactcgccttcaacagaaacgccattagcatgagcgtactccaccactgcttttgttttggcgatgttttctttaaatggcagatgtgagccatcgtacatgacacttgagtatcctgcatcgatcgctgccttgatctcgttgaaatctctggcatgatccaagtgcaaagcaacatccaccatttcagtattggcaatttcttttactactgccaccatcacatcataaccaatatattttgctgtatcaatgctggtttgaatgataataggtgaacccatctccttcgctgcgcggatcatttccggcagcatctccaagttatgggtattaaatgccccaatggtcatatttaaatcttctgcaatctgtgtaacttcttttagtgttttgtacatttatcgaataccttcttttcttttgattgattagccgctaatcgtgacttttttagcaatttgacgcatttcatccatcttattcatgtatttatcgatgcccgcatcatccccatttcgcgcggcttccgcccgttttgcgttataaagactcattaattttttatacccgtcaccaatggacagcttatagtctaaacttttttctaaactttcgatggctgaatccacctcttctaatttggcataattcaagccgagtttttcatatagtttagctaaatcctctgtttgttttgcttctacgatttttgccattaattgctggttttcctcggttatactgtccttttcttgaagtgaaagctcaatcttgtgttccgtcttttcaggtttgtcttttttcttaaagaaactaaacataaatccacctcctgttttttatgccttatatttctcccgctactgagataaagactcgttactggtaaactaattaaaacattttcaaaatcgggctaagaatccaagcataaagtaatgctgccgcaacggtatctacgtcggttgcagtcgcgttgacaaagcccatttgattgaagattgttactaaaagtgctggtagtaaggtaatgaagaagccatgggcgatcccgccaataatcgctcctcgacgtccaccagccgcatttccgaaaatccccgccgtgcctccagcaaagaagttagtcagcatacctggtaaaatcattgccaaaccaaatgtcggcaaaacaaacatggcgataattgttccgattgttgtcgtgatgaatcctaaaattactgcattcggtgaatacgggaaaaatactggacaatccagagccgggatcgcattcggtaccaatttcatcgcaattccgcggaaggctggaacaatttctcctaatagcaaacgaacacctgatagcaaaacatagactccgacaacaaattgaatggcttgtaagaaggcaaacattaaataatgttgtgcgccatgatcaccaatgcccggtccagcaaaggctgctgtgatgatgtatagcggaaccatcacaaccattactgacaaatacgtatcttgtaaaaactcaaaagattttggcaaattgatatcttcgattgattttttattttcaccacgttcaccaaagatatacgccacacctgcttcaaacatgtaaccgatcgtacagaaatgtcctaatgcgatatcatttgatcccgtgattttacgaataattggttgagcgatcgctggcattgctactgcaaaaattgctccaacaacacttccaacaatgatcaggaccaaccctctcaaaccagcgaagtaaccaaaaaccgtagtcatcgtcgccatccataaaatcgcttgtccagttaagaaaatatatttccattttgtaaagcgggcaatcaagatattcacaataaaaatacctagaaaggttaaggcaatatcgcggcccaagcctaactcattcattgcttgcccattaatagcttcaatagatggaatgattccctgcatgtgaaaacccgcagtaaaaatttctccaaaataagtcaaactgccaacaataatactggaaccagcactcaatacttggaatccaagcaaagtttttagggttcctgaaaccacttgacccgcagattttttctgcaaacatagccctagcatcgcgatcaaagcaattgtgattgatgcctgcgtcaagatattctcgataataaaattaataactcccatttgtttcgctccttattcatattaatgtattcatttttcaaaaaccgaaaaatgagtttgatcttcatgccgtataccattccactagttccctgaacttgaattgtgtgtgctatttttttgtttgttccactttatcaactgctaagagtggaactggcatccttattcatattaatgtattcatttttcaaagatcgaaaaatgagtttgatcctcatgccgtataccattccactagttctctgaacttgaattgtgtgctatttttttgtttgttccactttattaactgccaagagtggaactgacatccttattcatattaatgtattcatttttcaaaaaccgaaaaactgttttattaacttacggaaataagcgaaccaacatccttaaaatttctttataacgctccttttgcttctaaaatcggcagcagtttttcttcgatttctggttttgatacaatatttttcaaataaacaatggcggtcttctcttcatcaattgaaaatttttcaaactgtgacttaaaattttgagcggtaataattatgtctgatcgtgatgaggctgctgttgaaatgtccacatggtctaatcttgcatcgacaccatgagcatttaatacatcctctgctgccatttgagcagcgaaactactccctaaacctgcgccgcatacgaataaaattgatacttgttttcccatatttttctctccattcttatctatatatcgaactatgcataattccttaactaaataaaatctccttgaatcgttcgatatctgtcgcgcgacttaaacgattcaccttttcctcatcattgatcaattcaatcagactcttcataatatttaagtgcgaataagaatcaacagccgccaagcaaaaaatgatttttaccgggtcattctcttcattgccaaattcaatcggttctttgattgttgcgacacttattcctaactgattgacgccatcctcaggccgagcatgagccaacgcaatgtattttccgatcacgatatacggaccgtattccttcaccgagtcgatcatagcagccacataacttggttcaatcacctgatcatgtatcaaaggttcagaaactcgacgaatcgattcctcccaattacttaccttctgatttaataaaatatcgctatccttcaacacatcttctaacatcggctgaatctcctttttatttatctctaaatgattttggtcaaagagcctttccaattcctgatagatggctccagacacttctcccccgctttttttaatagtatcgatcagggaataaaataactgtgtggaatcttgattgttaactaaacgtttcaatttatgattttcatttaaaaagctggtaattctctttttgctctcttccttaattatcggctctagctccaacactggtttttgtgaatattggattgttactgtactgaaaaccaaatcgacatccagcttttcgatcaattctaattcccgcgagcttaacactgctaacacttcgatattaaagagctccttcaaattttcagataacagcttgccggttgcgaccccatgattacaaataaccactgccttatagacataatgcagctcttgattgatcgcactgacggatgttgaaaaatgaatggttaaaaaagcgatttcatcttcacttaatcgattgccagttacctgttcgatcgagggggtaaattgacgaatggccgaataaatagtgtcataattcttttttatgttttccttcaacgggtttacgatttgaatatcgcttttcacccgatttatcagaccgaccaaatgcttgtacagtccttcttgtaaagactcttcttttctggaaaacggaattttggtttttttctcgacaaattgcatcagttgaatcgaaagcagctgcgcctgaacccattcgatcgaattattcatgtctctcgaattgaaggtattcagcataaaaacaatgtatttgatttcgacttctggcggtgagagttgaaaggcttcgcaaatcgctgtgacaaaatcacgaatgtcgctttgaggtgtatcggcagcttcccacaccgagcttgcgatgagatcttctcgcaaatagcgactcaaccagaccgctgtgaacatcaacaattgattgcgataaattgtctcctccagcgaggtcatcgatcgaacatacaaatcatctaattttttcaaccaatgtaatgagatataacgattcagaattgttaaattaacagaagctttctgttcctcctgaggtgaaatcactccaacagcattgttgatcacatcataaaccatcgttcggatggagcgttcagctccttgcagcacaattccttgctttggcacactcaacacctcgatgccgtattctgccaaaatatttctgacgcgacgcatgtcttcatccaacgaacttttagaaatttggtattcctcttctttttgatacaaaaatgttgctttctttcctagtgcaaaagaaagaatcaggtcaaagatccggctttcacgatctaggtattgctccacatccgctaaatcaagctgctcaagcaaggaatctttttgctcctgagttaaaattagttgataccctttttttctaagatttttgatttcaggaagtgacctctcatttaaaaattggttgatttctcttaattcatttcggatcgttcgggcactggtatgaaattcctcttctagcttttcaagtgttacaggatagtcagaagttataaaaatccgtaatatttttactgtgcgatctttcattccaatcttcctttcgtctaaggtgagtatataaccctttatttttcttgataagtagagatttttgcaatcttttttggcaacaatgtaagcgcaacctaaaaaatgtttattttaaagcctttcattcatttgtaaataccgttattttatatctcttttcaaaatcatttcaggttcatcttacatgctttttttaacgagctatagtcagttcttacttgaaaaataaaactagcttttaatccttcatctttatttaatcctcttcaaaatgaaataaaaaactcccaccaaagtggaagttttttctatttttattgctctgtttattataacttaatctatttgatccaacgtaattgattttacaatctttgctgcggaaatattagaagtaaaaaatctggctatctattaatcaccgatggaaatatgtatactaaaatttaatagaacaaaaaagtctagtggtaataagtcaagataatttttcaaaagatttttaaaggtagttaatttttgaagcgcactgaactaaacccgaccaaaattaaaaattttttcgggtacttccaaggattagcgtcaataacatactgttatttatctatcacgctccttggtggcatatagagttgatggttacgtagtagcgtatccaccagacgcgtaaattttcttgcggttagtacgatggctcgtttgtgtttatgcttgggtgtttcagcgtattttttcttataatacgcatggtactcaggctcgtatctccttacggagttggtggcttcaactagataataacggagataacgattgcctcgtttggccataggagtattttcatactcagagttacctgattggttctgtcgccaatataaaccggcatatttagccaatttgctttcatctgaaaagcgattgatagggccaatttcagcgagtatacccgcagcataaacaggaccgattcctggaatactggttaaacattgatattcaggtagcacaacgactaaatcgtcaatggctttgtctaagtctttaattaacttttcaagactacgaatttctttggctagaacacctaaaacaatatctacagagtcctgatggacttttcctaaccggtaggaactacgtatggctttagaaattgcctttgcaattccttcgggatttttaaaacgatacttccctagtttttgaattaggttcgcaaactcttctaatgacagttcggcaagttggtccattgtgtaatcttccgtcattagagttactaatgtggcacttaaaacggatccaccttctgcttttagttctttagaaagcgtgttgcatttataataaatgttttcgataaagtgttgctttgtacgaaccagctgtttaattagctgataacgcgttctagttaagtgttggagggcaaggtattcttcctctttaatgatggagttgacttgcctttggatgcgaaaatagtcagcgatataaaaagcatcaatttgatcgtttttgttttcttcaaaaatatcacgatactttttaattttatttggttgttcaactgaaaccataaggttcaattgatttaactcaagatcttctttaaaaaacatagctggatgaaagctatataaagatgtggcctccattccaatcactaagctctctatctcaaatttttgagaaaattcgagaatgtattctttgatctggcttgcgccaagttgactatttccataagatgcttcttttaaaacagagcaagttgaatcgtctgtcataaagcaagcatctaatttttcagaactaacgtctaaaccgacaaatagtttcatgtggaaggacctcctttcattgattattcggaaattgcttgggtactgtgggatatcccagaatcacgttgtctaacgacagcctcgcataatagagtttcattcattaaacctctaagccacccaatctctactaggattggtagaggtcaatggactcagctagtgtgttggaggttataccaacggttcgggtcacagactttctgtcgcagtaaaactgcagaaggtgatagcgtcttcccgtaagtcctttccaagacttattattcaggaatatcctacagtatccaagtagtaatcgttattttatttaaacatattaggaatagcccctaagggcgattgaaggaatgaaagtttcttcaaaatatatattacgagaaggtgtgtaaatggaaaaggaagaaggaggatcattagcaataggaattgccatgggattgatgtttggcttgctgttcgataaccttgctttaggtttagcaattggggttgctttgggagcgtctggggcgttcgctgttaaaaataaaaaaggataatcagtactacgatcactattaaacgaaaagcttttcctgtctaaatcctttcaatcgttcgttttcccaactgttctcggttgcattcagaagaaaatcaatatttaatgcgtatttttatacatgatttttctttgctacaagcattctttaggaggattttatgaaatctacaattggattaggcaatattcttgcgtttattctctcttatcaaagatggcacagtgttcttttggcattatttcatggtttgtttggatggttatatgttttctattatggctttttctactggggcagctgagctctttactttgtgagctacaaaaactatcggtacataaaaacaactatcctactcactgaacaggatagttgttttgttttttaatcaaaaatttcctttgccatcgtaaaagcactccaagctttaggccagccggcataaaatgctaaatgagtaatcaatgcgctaatttcttcttttgtcacgccgttttctttggcgatttttagatgagcttccaattgcggtgctcccatggctaaaagcgcagagcacgtaatcatactgcgatcatgggccgaaagctcttcctcttttgcccaaacttcaccaaatagcacatcgtcatttaatgctgcaaactgtggggaaaattctcctaattgttcccttccagctgtttgttttttcatgatattctccccttatttttctaacttgtcgtaccattcatcactaaccggctccaaccattccggtgtcccggcagtgatggcgatgtgttcgaaccaactatcttttgcggcgccatgccaatgcttgaccccatcatgggtgacgatcacatctccagcttgtaaaaattgcggcgctttatcttcttcctgataccagccttctccacctgtcaccaataatagttgataaccatcatgatgaatgtgccagttgttacggcagccaggctcaaaagttacattcgcgactcccacattgattgctgcatcagcaaccaacgattgaaggtagctttgtccaataaaatattgtgcgtaagcttcattcttttctccaattggaaaaatcacgccttgttttacttcttgatgttttgtcattataaattccctccgattaattagtttgaataagccagcagccattttcttactgctatttctgagcgatcaacttttgaactgcgtacagctaatcctgttttgatctcagcgccagagcatgctacctgcaaatcttggatacttgaaccaaaggcactaccttcatgagtacaaaatggatagatcaccttattcttccactcttgatccgctaaaaaagtcgcaataatctgcggataagttccccaccaattaggaaaacccagaaaaatgctgtccacttgagttaaatcaattggcagcttctcataatcaatccgtgcagaagcttgtttttctttttccgcttgttgaaccgcctcgtcatagctttctgaataagcaatctttggtaataattcataactctcgatcgccaacgcgtgactgattttttctgctagaatggctgtatttcttttagtaatcctttgttttgtcccattaaggtagttctcaccagctcttgaaaaatagataactacagcagtcataagttctctcctcgattttatttttcgttgcatgcgattcctccaagtaagttgttcactattttctgtaaaaacatacgttttgtttctctataaactacgaagagcgcaactcgcaaaaaagtcgtaccctgaacagcttcagaatacgacgtatgcactactatgtctaatacctatagaatcatagcactatagcttaaaagcatgtttaaaccgattgatcaattcttgcgcagctggcgtttgcactcgttttttccaaactaagacacaatttgtttttatactgggttccaaaggaatgaaaaccgaattttctaatttacgatcagaaatagccccttcaatcgccaatgccatcccaactttatgatcaactaacggcaaaatattgaaaatcaaattgtagttgccaacaatgtttaattgatcgtatggtatttttgaccattctgctaatagcttttgaacttctgatcgcccagaacacaagattggcaaacctttgatatcttccggacgcagaacgtttttattggcaataaatagttccttcgacactaagaaaccccaattttcctctcttggcaaactcagcacctcaacttcatttaaaacaatcggttcaatcaaaatagccatatccaatatgcccttttccaaacgatccgagatatcatcactcgtacctgtgaccaaattaaaccgaatttggggataatcactaattaactcctccagaatcatcgccaaagtatccgagttatcggcctcaacacagccaatcgttatgatcccgctgagttgttccttgcgttgagccgaaaaagcctgctccagcttttcatccaacgttaaaatttcctctgctcgctctttcaaaaaaagtccatcttgagtcaaacgcaaccgatttttctcacgataaaaaagcggtgtaccaatagtttcctccaattctttgatttgacgactcaaggttggctgagtaatattcaaaaatcgtgctgcccgcgaaatatttccttcctgtgcaactgcccagaaataacgtaaaagtctgatttccataatttgcctctgttttttatttttcttttactataacagaaatttatttctacgtttacaaagctttcacacaaaacaccgacgaaagttccgtcggtgtcgcaattattctttgtttttcgcttccacaatctcattcaccagttcatcgattaccgggtcttgcaggtagttttttagagtaacgatcttcatttttggatgagcttttcgtgtacgctcttccaagtcttgatgaacaaccaccatatcactatcctttggcacatcctcaatccgataattctttacttcaatatccgtgatgccggctttttgcagtttcttcttgaaggtcgtggcgcccatcgcactgctgcccattccagcgtcacaggcaaaggaaactttactgatgtttgctaagtgcgtactttctgttttagcattttcgccattcaataattcttttccttctgatttcatagttttagatttttgcacagactcttcgaaactttcatcatcatctggagttttatctgctttcaagattacagaggttactaagaaggagacggctgttgcaataacgactccagcgattactccaaaaaagttccctttaggagttaaggctaggtaagaaaagatcgaaccaggactcggaccagcaactaatcctacgttaagtaattggaatgtcagtgtcccagccattcctccagcaaccatcgctaaaatagtaatcggtttcatcaatacgtatggaaaatacatctcatgaattccacctaagaagtgaataataatcgctcccggagcggtccgttttgccactttttttccaaagaaggaatacgcaagcaacaaacccaatccaggcccagggtttgatgccaccatgaagtagatggattttccggcttctaacgtttgctgcatccctaatggatagtacaccccttggtcaatcacattatttaagaaaaggacttttgcaggttcgtttatcaaagacagcaacggcaagaatccagttgaaactaaggcttcgatagcattcgttacgaattgattcgctgattggatcgttgggccaactactacataagacaagcacatcaatacaaagccgataattccgatcgaaaaattgttaacgaccatttcaaacccagctgggattttgccatctaaaaagttgtcggtctttttcattacccaaccaccaaatggtcccatgatcatggcccccataaacatagggatatctgcaccaatgatcaaaccaatcgtcccaattgttcctaatacagcaccgcgttgtccgccaatcatgcgaccgccggtatatgctaacaataatggcaataagtaactgactgttgggccgaccagctcatttaacgattcatttggaaaccatcccgttggaataaataaggccgtcgcgatcccccaagcgatgaacgcgccaatgtttggcaacaccatattcgtcaagaatccgccgaacgcctgaactctggcacgcattgatacttgttttccttcattcgttacatccatttccttcactcctttttcatattaagaaattgatttttcctatgaaaaatcagttctttcttcaagcttataccatttctctaattacgctgaagtaccaagagaaattgacatcctttactctttgaccaaatctaacagttctgcttccgtctcaacatcaaacaatttttcgtatagttcctcatcactcaacagctcgcctagactcgcaatcagatccaaatgcccttctggcgaatccgaagaaagcgtaaagaaaatcttgactggttccccatccggaaacataacgggttccttcacacggagaaacgtcagtccgacacctttgcttccatattctggacgagcatggggcatcgcaacctgcggcaaaagaataatataattgccattttccaacacgttttgaatgatcgccccaacataagctttttccacgataccattgttcacaagaggctccgcaccaattcgaatcgcctcctgccaagattcgatggtgtcgataaacatcgtattccctgttaattgttcttttaacatatgaccctcctatcccattgaatcgtaagcagcaactacttcttccagcaatttcccatctaaatgagaaattgttttaatcgttgcttttaaacctttttcttcaatcaatgcatgtattttctccgcctcggaatcatttgaatggcgataatgataccccgccgcaatcactttcactcctgtttcatagggcaaacccagtgcctcaagctttatgacaggagcgactaagcgatcattcggtcctaattttctaataggcgaaccgcctacacggataatctcatcagacaatttttgatttccctgccgcttaagtgtcttttcaataaagtgctccaactcggctaaatcaaatcgatatttctggacaaaataggcgctattctcagctaaaaattgattcactactttcactatctccgcgtctcggatcgcctcttgaatcatttgatatccatgtaagtctcctaaataggcaatggctgcatgagaagcgttgacgatgtacagcttgcgttcaatataaggctgcatgtcatcaatcaaaaccacgtgcttcatttcaaatggtgttgcagggtctagctgcttgcgattaatcacccattcataataaggttcaacgactgcgacagctttgccctcaacaactttaccaagtgattgccgatcaatcgctgtattaacaaaataagcatagtgatcataaacggcttcctcttgttgagaaagagtcttatagaccgcttcttttaagatgttactggcattgatagcattctcgttcgccaaaatattgatactgcgcttttgtttgaagcgttcactcaaacccttggcaatcgtcggtgcgatttttactaagttattcgcaccgacagaggtggtcaagatgtccgcttctttgatagctgcgatgactttttctgtctcggttagactattcaaagcgctgattcgatcaacaaaaacagtagtctcctgttcgtccatgatatcaattctatagccaccatcctgattcaattgctgaatcaaagcagcatttgtatcaacgaaacaaatctcaaaaccattttgatgtaagagctgcccaataaatccgcgtccaatattgcccgcgccaaaatgtactgctttcattttcttcacctactccagattggcatgatattgccataagctgtgcatgtcgatatttttttcttccaccatcatcaaagcgatgctgtcacctaacaatagtagagattgttcaaacagactcgtcatcggctgaaccgatggaacttctcctggcaaagccaacttcgtttgaacagggattctaacaaaaatatccgtatactccttcattgaactattggcatttgatccaatatgggccactgctgcaccaaaactcttggcctttttggcgattgctaatggaagtgagctttctccgctgccagatccgacaatcaataaatccttttctgtgatggcaggttcagtaatttgtccgacaaccactgtttgaacacctaagtgagctaaacgtttggcaattccttctaatgaaagaagtacacgaccgacgcctacaaagaatactcgctccgctgcttcaattgccgctacaagttgctctacctcctctggggcaatattgtctaaagtcgcagagatttcctttgtaatcttttgttctacacttttaaatcccactagttttccctcctacttcaccaacattgctttatttatcgcatctgctaataattcacgattttgcgttagtgtattttctgcaatgaataggcttgtacttcctagcactaagtttgtcgcacctgcggtcaataaatctgggattgtcgctaaggagacacggccgtccacttgaatatcaagtgttaatctttgttcgtcaactagcttacgcaggtcagcaatttttttcagtgcgtaaggaatctgcttctcagctttattagtggcaaatcctggattgatcagcatcaagcatacccgatcaatttctggcaagacatactctaaaacattcaagggtgtcgccggatttagcgcaatcccgactgttgttccggcatgcttaattaattgaatataccgatcaacatgcaagctagtctcgtgatgaaaggtaattccttcaacaccgattttcagcatctcgccaataaaaaattcattgtcattcgacatgatatgcacatcgaaattcatcgaagtgatttcccgcatccgtttgatcgtttcaattcctaatggcatgcttggactgaacgttccgtcaataacatcgatatgcaacgtatccattcctatttcttctaattcattgatactcttttccaaattcaccaaatctccgcacatgattgacggcgacaaaataattctactttccataagtttcctcctgctgttaacacatcgatttctccggaaaaatcaatttgattcgaatgccgtacatccttcgtttacatccttattgtaatcgcttaacaaatacaagtcaacacaaacatgcatattttttctttttatttgcacgtttatgcctgtatattcggttgaacttatctgtaattgacacaaaaatgcattcatggcatcattaactggaagaaacaagaaggagtgcgcactatgttgaaggaagaacgtcatcaaaagatcgttgatctgctaaatattgaacaaaaagtcatcgctagcgacttaagtcatcgtttcaatgtatctgaagatacgattcgtcgagatttgaaggagttggatggtcaaggactcttgaagcgagttcacagcggggccttacgcgtcggtccgccgatcaccgatttttcttatcgagaaaatgagcacaatgaacgaaaaaaggctctcgctcgcaaggccttgccctttatcaaagaagattcagtgattattatcgatggaagcaccacgaatttggcgcttgtaaaggaaattccagttgatttccgtgcaacgattattacaaatagtccagcaatttctgttgaactcgcgcaacgagcaaacattgaggtgattaacattggaggaatcttttacaagcaatccatgattaaccttggtgtggaaacctacaaatcgttgcaaaaggttcgagctgatctttatattatgggaatttacaatattgatattgaggcaggcaccagtgtaccaactgtacaggaagcggaaataaaagcgcaaatgacgcaagtttctacagaagttttgggtatgatcacaaatgataagttcggcacgatcagtaacgcgatcgttggccccatcgatgatttgagtttcctgatttcagaggatattcctgataaagtacggaaggaatatagtaagaagaagttgcttttgattgactagcttgtaaacaaataaaaaccattgaatcagaaagctgcgtgtagcttctgattcaatggtttttttactaataacatttaagtttttgcgctaactaaccttttgccgacacagtgtcatttgaatgggaaaatatttcttgctcacatttctggatcatctgatcgtaattgtccagctttgtttctaagcgggcgacggtagcattgatcagctgctgcttttctagtagtttctggtattcctcgattaaaattttcttgcgttcaactaacgtggcatttcccagctgatataattcggagtattttgctaaggaatcaattgaaagcccagaatctcgcatacatttaataaattcgacccagtttaggtcctcttcttgaaaatcacgaattccagagtcatttctggtaatcggaggaattaatccctctttttcataatagcgaatgttgctggagtcattttaaattttgctgcagcctctgatatgttcattttctccactcctttagtttgccaacacatttaaatcttaataggctttgctcctattttaaaccagaaacttcaaatagttaccatcgatttacggagccaaccattctttcacaagactggccgtttgactcctatccgaagaggtaatgcctaatccttaactaagcgttgattgatccagtaattctctgtaacgttccatagattcattaatagaactgctgccgctggtaaagaaaggataaactctcttttccgctaacctattttcactgatcaacttttctactggtaaggccggttcaccaaaccagatcggtgttccaagaaaaatactgtcataagctgacaaatcgacgtcttgtttcacaatagttggtgattctcccgctttcctttgagcttccaccacatctaaaacctcatcataaacctctggatagggttcaaccgtttcaattcgcattagttcaccattcacctgtttttgaatttcctcagctacagcttttgtgttttcagtcaatgaataatacacaatcagtgatttccttagatcttcggtttcctgattctggttggattcgaggctttcagatgattgaacagcggatttacttgtgttcaccacatccttatccatcgcattcgatccgcatgcaccaaaaaataagacaactggtaaaataaccaaagcaactttttcataacgcctacctccatttgctttagttctagcataccggctaaagtgcacgttaagtcaagagtcttttaaaaaaactgcatcgaaaaacgacacagtttcgcacgatctcttaatatttagtcatgaccaaccactttatgcggaacatacggctcttctagatacaaaacatcttctgctgtcaatttgaaattgacggctcctactgccgtttcaatatggttcatttttgttgcgcctacgacaggtgcagcaacagaatttttttgcagtagccaacctaatgcgatatttacacaatttgtttcatatcgttgggctaattccgccacacgatcaataatcagctgatccttatctgccgtttcatcatatttggctttttgtgccacatcggtactacttcgcttggttgcttcagagcgatcacggatcaaccggccagatgccattgggctataaggcgtcaagacaatattttcagattgacaatagggaatcatctctcgttcttcttcgcgataaatcagattcaaatgattttgcatcgaaacaaatttagtccaatcatttttttcagcgatcgtattggctttttgaaattgatacgcatacattgcggaagccccaatatagcgaacttttcctgatttcaccacatcatgcagcgcctccattgtttcttcaatcggtgtatcataatcccaacgatgaatgatataaaggttcacataatcggtctgcaagcgtttcagactttgatcgatctgaaacataattgcttttcgcgacaacccttggccgttcggtccgtcaaacattttctgatgaaccttcgttgccaaaacgatttcatcgcgatttgcataatccttcagcgcttttcctaaaatttcttcactacggtcccaaggaatagacattggctgtgtcaaagaagttaatccccagttcgagcgcctttttgatcaagggacgactgtcttcttcctccaagacccagttataaatccaatttctaggatcaccaaaactcatagagcctagacaaattcttgagacatctaatcctgtatttcctaattttttatattccatctttttcacacctttcttctactttattagtttacttgttaaagtgcactttaaggcaagctttttttcttatcatacaaagatctttcagacattaagaaaaaacggcgtggacttttcgtttacaaagtccgcgccgtttttactttattttaactaactatcccaaaacaatccctgcatccttaatcgctgcttcaacgatttccataacgatcttgctatgatccagctgctttttaacaaatgtcatatccttatcttcaatcacctgattgaatagtttgaattcatcaaacatccgatggggatgatccttgtgatcaaaggtttcgatgtcgccagccaatggttgtgtgctgtagctatccaaggtgttggttggaccattgacgatcactgatccttctgtcccttgaatcgtcgagcgaattgtggcttctgaatctttggcgccgatacaaactacttttacatttccataatccagcagcagcatacctgacgtgtcgatatcccgttcaatgttggcatagtactgtactcgttcaggttttcctaataaaccaacaactaaatgaatgttgtagatattaatatccatcaacgccccaccgcccatttttggattaaaagcgggtaaaattgttccttccttaaacgcatcatagcgggaagagtattgtgagtagttgcattcaatgattttcaaggtgccaatctttttaacagcttctttaatcccttggaaatttttcaaatattgattcgtaatagcttccactaataccagatctttttccagtgctagctgttctaaatccaataattcagctgccttcaacgtaaatggcttctcgcaaatcacgtgctttccagcttctagtgccttttttgcaaagctgtagtgcaggtgattcggtactgctacgtaaaccgtatcaaaggcatcactttttaaacactcatcaatatccgtgtaggaggcttcgattttgtattctgcttgaattttctccgttttttcctgacttcgttttgtgcccatgatagctttcaattgaatctccggtaaatccttcgtgattgctaaaaactcttgaacaattttgccagaaccaaaaatggctaatttcattgctactccctctttctctgctattttgagacttgttggatgcccttttctaacatttcgatttgcagcagcgtttcttcatctttgacggctttaggtttgccgttaatcaacgtttcatagatatcttcgtagacccggctataatcgccgatttctgaaacgaccttctcttcatgaaacacgccttcgtcatccatataagtcagcgtaccataatgctcaggcaaatcaatcccgaaatcttcgttttcaggcatataaaacattttcaggtgctcttcttgacggtcttttgtttccttaacaaaaacaccttttttcccgtaaaccacaaagctcggacgttccttcaaacggaaatagctggatttcaccgagaccttcatccgaccataaaacagatccagatcaaagtaatcattcattcgatcatcgcctaaaagctggcgtacttcataatgcacatcatctgggcggccaaaataagagatcacctgatccaatgtgtggcaagcatgtccgtatagatagcttgttccgattgaaaaatgctcaacactttcaggaacctctggccggaaataatcatagtgcatctcaacttccaataaatctcccagcacaccactttcgattactttttgtacggttaaaaagtctgaatcgtagcgacggttttggtagcactgaatgaataagcctttttcatctgctaaacggaataattccttggcttcctcagaggtttcagtaaaaggcttttcgatcagaacatttttcccgtgctccaagacttctttgcctaatttgaaatgcaatggacttggcgtcgttacgacaactaattgaatttctggatcattataaatatcgttgatgtctgatgtataattggtgccaggatttttctcccaggtaatgcggccgctaggtgaatagatggttttgaccttgattttgtcggttaatttagttgaaaatggtaagtgatagcgattagtgcttttgccgtttccgatatatgcgatagttaacatgaatagattcctccagatttcttttgataattttattatataagaacgactcctcctgaaaagaagattcagtaaaacaggtcgttttatccaagctttcgtatgcatacgcataaattctgaacattttatccaaaaaaagcttcaaaatgaggccgtttcttctgaaatcggttaaattgcgttatgatagaatggatggtagttaacctaaatgaaaaggtgatggaatgttattaatcgataaattacgaatgcaaaaggatctgaccaatacggaaaaacggatcgctgattatatcttacagaatttaacaacaattccagcaatcaacgtcgcagatctcgcaaaaaatacctatacctcccattcatcagtgattcgcttagctcaaaaaatggggtttgacggctttcgcgattttcgagtggcggtttctgagattgcccatagtgacatttatcgatcgaaccctgtcgatgccaatttcccgtttttaccacaagactcaaccaaagaaatcgctaaaaaaattgccgatttgaccatcaacacggtccaacgcacctatgcccaattagatgatcaagttcttgatgacgcagccgagctgttggctaaggccgaacgaatctttctatttgcccaaggagattcccagattcgggcccgcagctttcaaaacaagctggtgaagatcaataaattcttgatcattgcagatgaatacgcagacgaggattggaatgccgccagcctaaccagtagagattgtgcgattttcattacctatcgggcacgcgtgccgcaatacgaacgaatgatgaagcactttataaacgaaaatattcctgcaatcctactgacaggcaacagtcaatcgaatttgattcctctggcatcccagtcaattgtcttcacccaagaagaaatggactatgtaaaagtcagtaccttttcttctcaggtagcttttgagtatattttagatacacttttctcactattatatgcgaaggatttccagcaaaatcttgccgacttcaaacgaaaaaatggttggatcgaaaatgggatattgtcagatcatccgtaaactaactaaaaagggttctataatatttggtgttgttactctttctgagtgagaacaccaagtctttttttatcttgaattgtcaaatcaagtgcaacactttattaaagaagacttcataaggtgttttccaacctagacactttctaggtctgctatttagtttttcaaccatccgataaatcgttgtgtcatctaccgtgtccatctctttcgattttggtaagtattctcgaataagaccattcgtattttcatttgttcctcgttgccatggggcatgcggatctggaaaataaaagggcacattattcaatgcttctgtaaccgcgaaatgattggagaattcttttcctctatctggagtgatcgttttaaccacctcattggggatactgcttaaaagttcaatcattttttcgctcacgtaagcagctttctttctcggcgcttttcctgctaaaaggaatcgcgattttcgatctgtcaacgtcactaaacaagcaccaccagtttttccagctacagtatcggcttcccaatggccaaactcacttctatcgtctgcggattttggacggtcatggatcgaatgcgtaatgcgtatttttccacgagtctcgacgtgattttttgtatgccttgtttttcctcgatgacgtaatgaacggatcagtcctctattgccatgggagagcggttctgtatcgaaaataccgttgtaaatggcacggtagatcgtgataaaactgatggagaaatccgcatgttcgaacttcaagcggttagaaatttcttctggcgaccattgaaaatcgacaaataaatgacgaacgattgaccaaattcgcggatcttttagaaggttatgacgtccgcagttttttcttcgagaagcatactttttgtctgctttggaaggggagtaggttttctccttgtttcttctcagttcacgtgaaatggtagacgggctacgatgaatgtcatttccaatttttctaatagaaacaccttcttcgtgaagtagaaagattctttctcgttcgagtatggtaagatgatgatactggctcataattatcttcctcctagtagtgttctcgacaaacctattctagttggatattgattatgagtcattttttatgtgttgcacttaaagtgtaaattcaagatacaaaaagacatttggttgtcctataattaaatcgctgaacccaatcataggaggcgaaccaaatgtccagtattaagaatatcaaatataaagataattgcctagacaaaaccatcaaacaaatcctaaatattcatgattccaacattacttttcctaaagacgccgtttcaaaagaaaaagtccatgacagaatggccaccgtctttactggtcgactgagctatccgtctcctcggtgtgagtgttgcggctacgactccgtcatccatcatggctacaaagatagctggattcaattactcccttatcaagaggtgtctacctatcttcatctctataaacaacggttttattgtaaacagtgtcaccataccttttcagctaaaacctattatgtcgcagaaaactgttatctctcccaagcgctcaagtttgcgatcgctgttgatttaaagaagaaaatttcgatgaaagatatcgctcaacgttacttggtttccgctaaaacggtcgaacgggtcttggattctttttttgaagaaccacgactgaagcccaattacttacccaaacatctattgattgatgaattcaaaggaactaaggactgtcagggcgccatgtgttttattctcagtgacgcggacacggggaaaatctttgatattttagaggatcgaagaagcttcaagctgatcgcctatttcatgcgttttacttatcacgcacggaaaaacgtttctcatgtcgtgatggatatgaatgcgggctatgattctgtgacaaaggtcgttttcccaaatgctcggatttccattgatcgatttcatgtgatccaacaactcaatcgtgcgtttaacaaacaacggataaaaaccatgaatcacttgaaaaagagcgacccgcaagccatgaaaaagtatcgcaagcttaagaaatattggcgaaccattctgaagaaaaatagaaaaatcaattattcttcgctcaaacaatacccgcttttccaacggaaatacctgacggaatcggaagtattggactatttattatcgattgacgagcacttacggacaagctatgatgtgtatcaaaatttgttagatgcctttgataccaaagattataaagacttttacgaacgcattgatcacttacccacgatgcttgatccaacatttaaaaaaagcggttctttacttaaacaaacacaaacaagcgattatcaatgcgttaaaatacccctattcgaacggaaaacttgaagggaagaataacttgattaaagtgatcaagagagtggtgtttggttttagaacctttcgccaccttcgtatgcgaattctgattcaacagaatctttgcgacattatttgaacaaaaaatcaaaaagaaaaaaggaaacgccgaagcatttcctttcagtgatttaatgaaaacaacacgatttgacttagagccctaaaaagcgacactactttacaagtgtaaagtagtgtcgctttttactattttatctcaatgttaaatttctttagtaaactcaacgttgcttcgtttaattgatttccagcaactagctctgaattaatataaaaatctgcttcaggaagagctccctgcaaagccaaagcattcgctaatacacataagctaagctccacaccaacaacttcgatgtgatttttttcttgttcatgtttttccgtcaactctcgaacctcgatcagtgcttccggcggcaacgcatagtaattctttttaatcacgtattcttccggcaaaggagttagtttcttaattatttgtagtccgtccaactcttctgattcattcttatgctcgatgggaatgtctctagtaaaaagaaccatttccccagattcacgggccttttctaaacgatgcagtattttaggaacaatcgtatttgcaccctgaacataattttcatcatttggatccaaaattcgattctgcatatctacaattactaacatcgcgttcctcctattgctttgagcggcctaagaaaaatgaaacaatcaaaactaagatgatcgcaccaataatagatggtactaatgccatccccgctaatgatggaccccaagagcctagcaacgcttgtcctagagcggaaccgactaacccggcaacgatattcgctatccagcccatgctattgcctttacctgtgattgcaccagcgattgcaccgataacagctcctataattaatgaccataataaacccataataacttcctcctattgtttaactattttacttgtgtatcttggttgtctgtcattttttcttgtgctttttctgcaccttggttaaccgcagctttagctttatctgtttgctttgaggcaaattcgccagtcgttttcgctgcacttgttactttgtcttggaccgtttcactatcttgatcaaattcttccttggttttgatatctactacatgaatatttacttcaataacatctaaatgcgtcattttttcaacttcatcatgcgtaacttgtctaatttgatcaacaacttctgtaatgtctttaccgtactcgaccacaacatccatatcaacagctacttgttctttgccaacttctgtttcaattcctgccgtaacattctctgtgttaaccaatttctccgcagcattcgagaagaaaccaccattaactgttagtaagccatcaattttatcaatagcactgccaataattttttggatcactttatcgtcatagacggtttcacctttgacttgtgcctccttgttagtgctaaattgattcgtgtgtgtttgttcaggtgtttctttgccattaaagtttttgttttcgtaattttctaccatcttaaattcctcctgttaattgatattccttttaccagatgactcatttgatcatcttgacctgttcagtaagagaatagcttttcaaactattcatacaaatgataaaataaccatttatattttatcggaaaatcacgctgtcattttcctcttcttactttcacttaatagcttaacgcaaataattttgtatgaacaataatctgcttacaaagtcacaatatataaaaaaataaatcatatttttgattgaaaaaactgatttcagatagctgtcaataaaacggttatattatagatttattgtcatttttcttcagttcatcttcaatagaataaaataacaataaataaaaaacggttcttcactttaactgaaaaaacctttctactcaactaactaagttcttttcttcttccaaaaaataggtttatgactaggccatttagcacagtcataaacctattctgctacctgcactaaaacagcggtatctttttaaagtttattcttccgaagccttttttgcaggtggcggtccttttctttctgggctcttccaggtaccggagcctaatcccatgatagtttttattgcaggaataaatgttaccacgattgttactgcattcatcatccaataaaaaagcatgtatagcggcgcaaataataaatattttattttcctgccacgatcatccacaatcagtgaagccactaattgaagaattcctgagatcattccaaagcagacgaagagaaaagccatcgtaaacatatgatagattcgttccgtatttccatctagtgcaaagcgagccaagctccatacaaacataaatgaagagatccaaaagaagaaggaccagatgatactaaaggtttgatcaataaacatcactgtacgaccaagattattgaaaggatgcagcagcacttttctaaaattggttagccaaacttctgttccacctttagcccaacgttttctttgacggtaaagcatcttcaaggattcgggaacctccatgaaaaacatgatctgcggcgcaaaaagcgataaccagccatccatttgatgatcccacgcaatactgatatcttcagtagctctgtcttgtctgaataagccgacatcgatcaatgcatcttttctatacatcgtatttgctccgctgtaggcgtagatacttcctaaaacgccaatttgagtccgtttgataatgcctacgatactagagaattctaccgtttgcgattttgcgataagtctggttcgattttgcacgtccatattcgctgtaatcgcagaaatattcgttgaatctgatctaagaaagtaattcacatacatattcaaagaatcaggctctggaaccgtatccgcatcattgctcaaaagcagtttcccacgagcaaacgcaaagccaatattaaaagcatgagccttgcctttattcttttcaattcggatgactcgcagttttgggtactttttttgtaacctagctaatatttcaggcgtactgtctgtagagccatcatcagtcactaatacctcataatgctcataatttatttttgtcattaaatattctatcgtattttcaataacaatttcttcgttgtgggctggaaccatgatggtaataaaaggttcaatttctgagggaatctcgtgccaatccttttgacgatacttgaacaaaaaagtatagcaaaaaacaccaataaaccaagaaaagccgccaataatcggataagtaatcagtaccaaaaacatcaacgtaaaaatgacatcgacaatataattgccagtatggaaaaaagtgatcataacttcacaccaccttttttatacagatttcgtacaaagtccgtatccagattctgctcttcctttaccgaatagtagcaaacctctctgcgaaactcttctgggccaaagcgtttgtcatactcgtcttttagtaactgccgacgggcatctaagcgttcttcgtcatactggactgatttttgtaaaagatttttaaaacgataattattccaaatcgtcagtaaaatgaaaatcaccgcaatgaccacaaacatgatacataagaatatgaacagaaattttaacgtttgcatttcttccttataaactagaatatgattctctcgtgcattctccggagatatgaatggcagtaatatccatataaaaggagcaactacacaaagccaactaaaaatggcaaccacagtttgtaggattttcaacaggtagtgccttttctcaaaatatgaatcagaaacaagcatttttttacttcgtcccgactaatttttggcttcacaaggtcgccctcctcgtactcaaattatttttttgcatttatcttagtttgccgttttcatgcaaaattttcaaataatttagcttttctgatgagtaaatttttatcagattagttttccattgactaaacgtaaaaataaaatgaagagaaacatagattacaaaaaattagtccataaaatacaagcaaaaataaaggaacacatttatgagctgaatcaacagatcataagtgtgttccttatttatacttatacaattacgaatagattacctttattaggctcagaaatagcggcttactctcctcaaataatctgacattccgtgttgctttcggtaggataatcagaatacttgttatctggtcgcctgcaaagatcataaaattcatttttcaagtaataccccttgccccatactgtttccaaaacatcttcggaaaagccttcgttgatcaatttgcggccaagatcttttgataaaactgacagttgggccaagtttgaattcgatggctctttattccatatatatttgcataactcttctctagacacaatcgaagcatgtgcatcgtacaatttctggaaaaatttttgttgatttttcgtgaaatctaaaaatattcgatcgtaatcataattatcggcatgcttcttttcagattctttccttgcaataccagcacaatcacttatcagttcacgtaaaagatccatcccgatatcttttggtatccatttatcaattgctaagtcttttatactgtttttttcattgtcaattggctcatttaaatattctctgaaaacaaaaactcgtttttcctttaattgaggaacaatcatttctacttctttgttagataaagattcactcaatatgacaagttgaaaaaaacgaatactcccttgaacactcatgcgtaatatgtcatcaagcatcgtttttgatacgaagacttcataattgaacttctgtaaactctcctgcatagagcactcgtttaaaatattatgagttagtattaatattttgattttcctcaccctgcttaaatctatttttatttgatgctcaaatctactcgtaaaactgtgccttagatacacacccggcttggtaattgatagtagctcccaaattttttgcaatattttctaattctaaaatacgtttcttttcatacgtgtcaaaaagtacatgattgtctacagcaactatcaaaatataatttactagcctattttcaagcaattctgggtatttcgaagaatctatctcagtatagacttgtagcagaacatcagtgatatcccttaatcctttatttttatcagcacgagcaatcaaatgattgtacaactgataaacaatctttttagtagatacacttattcccattgtcttcctcctaaaaaagcgttttactgttatttgatctttcaattgctagtaaaaaaaagtaagcgcgagtatatgcactgctccatagacgaaataaacaaaacattggaggaatcaaatccttcacatcattcttcaagcgaataagactttttttcaattgaggctattaattatcgaacctgaagtcgatgtgaaatgttttacttcaaactttttcatattaaaactcctttatcgctgctcttacatccacccattttgcatagcttaggaagttgtttcattatgtttttttagtaccttacagttactactgatttattcttctggtacatcctcaagtgaccaacacaatacgccattgtatgtgccgactgtgtctgagggatgaattgttaattgcaaatgctccgccaaattaaccttcgtactgccgcttccatcccagatcggttgattgtcctcattaattggaacatcttgcttctggtttttatagcttaatctttgagcgagtacctggcctttttcatttgttagcggctgttcttcttttactttaattgtccaaggacttttatccagcttgcttacatcctcaacccccaattcttccttcgtggttgcagagattatcttatccatcgctggaatctcattttcaccgaaactaatcgtattaggaataataagcttaggactagattctttcttgataattctactttccttttcagattcttgattgttatcgtcttttatatagaagaaaacctcttgatctagccaattttcaggaaatgtgaacttaaccttatctaccatattttcaggagcgtctgcgtattcctttagtactttttcttcagtaccgcaacgagccatcagatacaccttagcaccagtgtcgtgcgaaaacgtatatgaaagttcgcgtgaattagtaaaacgcgagatgtagagcggattttcattatcattcagtttgaattgcaatacctttttcacacgatagcgatgaacaatcatctgttcatccggcaagaagattcccttgtcttgcttattatccttgataggttcatatccaggaatttctggataatcattagataaatcaaagggtgtagttaggattccttctttcgttatcgactcacgtaacgtgttgtctctttcgtctaaaaaggctatagttatttttgcaccataattgattacagaagccgccgatttttctcctaaattttttccatcaaaaatagtttgtacactaaacggcaagcttaatttcccatcagaaacagcagatgaatcaacaggattttctgctccgatccattttagatatacgttatattgaagaacggtgtcatatagacgattatctgttggattcttagctttaattatcacatggttgtcatctgtaacctgataactaaataaatcggtaagatcctctccaattatattagttattctcattttttctggctcatattgtcttgtctgattcacctgctccaaattgaaatcaatttctatttgatttgtttttgaccattgatcaacatttggcatcgtctgctgtgccttcaaataaacatctttatttgctacttcaaattctgaatctacagcgtaagcaggaggaaattctggtttggctataaaatctgtgaaataaacaattgacgaaggagtaacatcgttgttgtgtaccataaacgtgatagtagaaacagcatttgttgttacttcaaaacgctgacgcggatctcgccaaggaattccagcggttatattttttagatataaccaatatttatctcctccgccgtcccaagtatcataaagaatatgtgttggattttccgcatacaatgaatcaattattgtgcctggatttttatagccaatatatttgttttgatttagcccataataattaaatgcggtttttatctccataggctgaccatttttgtccaaaaaatcataagtgacgatcatttcacctgaaatatcaattcccagaaaatagctctttgtgaagctgatggtcccgccatctaaattgcttttatttctctccactgttatcagtaagcttacttcttttccctcatagaaaccgacatttttcactaacgctttacttctatttgtctttcgatcaaccgatatataatctgaaccgacatctccttcaagcgcttcaacagtcgtattttttccataatgcatgatgaaggtattttctgccggtgttactgattggtttgcccaatggaagtaccctagatctgtcagaggtctaggtgccgcctctactctgactgagttccagaaaacacctgcaaataatattagccaaaacaataaatgactacgctttttcatcttgcatcgcctcatttctaagtttcgttttcaacgagtagatgaaaacaactaaaactagaatcagcaggccgattcctccgaataaaagtgatttttcttcatttgtctttgggtacattttagaacctgatcctgttgcgactgcccccatttgaggtgcgtcacttttggaatcattcatcgataccttctccattggtatcgtttgatttttattactaggttgataaaatgttatacccacttcacttttggcttgctcagcagcttctgctggcatagatacccctatcaataacgccaaaagcaagaagctcaaaacttttttcatttttctcccccgctctatcgatctttactttttaatttgtaaatatacacgattaaaccaagaatgattcccaagaatacgatccctattaaataaagcaaccagctataatcctttgtgtcttttacttctactgcttgcttattcaatttttcatccgtacctttgatttcaaactcttttctaaacacccatttctttccagcatcattttttaaatgcattgttagttcatacttgccttttttaagaggctcgttattccagctgattggcaaacggaagctggttcgcggtgcaaaggagatttttttatctaagactttcagtatgtccttctgacctttttttgtcaccgtcgcatgcatggccaatttgctcatgagtatgggctgcgtattttccatctcagcaaatactgtcaaataaccattgtctaatcctggagtcactttttttaaagccaatcctggttgaatctctttatccgaacagctgagtttggcaccaatagtataggcaaatttatttttaaggctgaacccttcatcctttttttcttgccctttcgtatcttcatagcaataaaaaccgcctagaatcgttccatcgaatccttcagcaggaatttttaattgaaagcttacatctcgtgcttctcctgggttcagcgtaactgtctgcggctcagagataagttcttcaaaagaggggccgccgattagcttggctccatgctttgaataatcaattgaaccatttttattagtaatggcgttatttccctcaacaatgacctgaatctgctttttacttgtattttgcagcttaagtgttagctcctgctcagcaccaggctgcaccttcagatcataatagcttgcctcagattgctgattatcaggtaaaactgcttgagcatcaaagctgaccttatttgtcgtgtttttttcttcagccaaagtatgagttggtaaaaaaagaactgctaagctaacaaaacaaagaataaaaaagagggggaatctcttcccccaccctcctagcttcctacgctggcgcatcagttaacacccatgttaaatctgccgtatagctttgtgcttccaattcagcacgcggtacgtgaagcttcacattttcattttgaccgtcttggccttcaaagactgccgcaaaaccaccagcaccttgtccttcttttgccaacattacatcttgatattcatcactcaattcaaagaaatcatttgccattttaggcgctactgattcattgtcttttgtcacgactttcccattggctaatgacatttttgctccagttagctctttgccattttcacctacaaatggagagatagttacaccaagtgtccaaccttttgctccgcctcgagtatcgtttacctgcacgtgtggcttttgattcattgcaaagtaatctgtatctccctgtctgatttcttgttgaccaaatgtaatatttgatgcatacggaatagatagagctccggtacctcctgtacctggatcatcatcatgagtatcatctggaacaattgggtccacatcttctcccgatcctgcagtgaatgttacgtctgttttgttcgtattcgttgtaatatcctcagcgaaaacagtcgtacttgtcgcacttaatgccaataaccctagtgcggcggttgtaactatcgtttttttcattctataattcctcctaaataataattagtctaattcaactaaatcaattctcgcatggacttcttactatttctagttcgaaaattttcctaaatccggaaaaaaattagaaatacttctttcatcaaattaaaagacgcatcgacttttacgtccatgcgtctttttgattggctatatcatagataattttccctaattgtcgccagtttctttcagtggggatgtttttcattaataccaatggtgtatctccagtattgaaataatagttagaaacgactaaatctacttctgaggcctttgttttataatcataaaatgctaaagtatacgtatgaccaaattgtacattgattttattcatcaaccataagcgatgagtatggtgcagatcatcttgaattaatatctttaaaggcttaaagctgcttaaaaacagtccgtaataatctaaaacaaagtaatagtttaaaaatagctgctcccaattatctaaaatagccgatacttgtttatctgccatttgattcagtgttttatgaaacgtgttaattatatgataattcctaggtttctctgcaagaacctcattctgataggaacgattaaagaagagatcagtatttccataaaaaaataggctcctctcatgaaaggcaataaaattgaataatagctcttgatccattacagccaattcaaaattgaactcctgtctcaaagcagcagctaaattctccaccgctcgataagaatcggtgttagccttttgatgtgccgtggcgtaactattctcatagcatttgttcccatcaataatgccgaaggagtaaatgatttgatagagaaaaaaaagctcatcattatttaagaccatgtcggtttcgctgtgccaatgtctcagtcgttcaaaatatggatctaattcgatgaccgccttcacgctagtgtgaattgatatattgacgattttgcttctttccaaggttattgccagccaataagaaaatatacgtttctgcagtggttccaacgaaattcgatagttttcttcaaagctttctatatatgattctatcttgtttaactttgtagcaaagggccaacttccaatattttcccgcgttgaatgccagtaaaagtaataataaaagcaacgaattctttgttcctctgcctgtaaatagagcttatagggctgaaagtcaatgtgataacgctcgaaatacggaccaagtaactttgcatatcgaaaaacagtcgatacgctcgtaaattgcttttccgcaaaatcctttaacgacttttcaggctgacgatacataaaatcgattagctgataattgtacgaagctttatagaaatgaaggtagattgcatagattggaaaatcctcttcctttttgacatagaagcgtttgttttcatcatttaacagataaattctaccatcatagatctcaaacagtcctgataattcttcaatgtagtgtaagacagatttatttgtaaccttgagcaagcttttcaattcctttatagtgcaccaatcatttttctccagcaggtgatcaagtaggaccactttttttacagatgtttttgttaaaaacgtttgcatttcttttaactcctaaccctttcttctcagcacgtaatgaccagccaaagaatagacttccctcagattcgaaggaagtctgttctgatcatcactaatcacttatcagacgatgctgttgatttgtttcgttttatataaataaagtagaaggactagagtaagaacagctaagacaatagttgttgacagtgctgcctctgctccgaactgtcctccagttagtagcgggttgtccccatgaatgatcgttctaaagtatccagattcggtagttccgctgactggaattcccaataaggctccctgcacccagttccaagtaatgtgagcaccgatcgctgcaagcaagcttccagttttatacatcaatactccaaaaaaacatccggcaagaaaaacattcactaaagctagtaagcttacattcggatttagagcatgtactaaagcaaaaagaagacctgaacctagtaaggcgataattggtccaaattttaacagccgatgctgaataaacccacggaaaattaactcttcactcgtaccgacagccacaaaaatcacaaaattaacaagtaatttatacagattttgatttcctgttttcaactgataaagtcctggtaaatagagtgtccctgtaataatcaaaaatacaccgattcctgctaacagtccataaattaactgacgcccatcacccttgttccagctcattccataattacgaatcgtctttttttccaccctactagcaaaatagaaaaacaataagcaaatagaaatgtgtactactgtactcactaatgcacttactaagagcatactagcaggaaatagtcctgcgactgcattattacttatcatccccaatacgaatccaaataaggcgataactactgctaacccttttaaaaaatattcttttttcacacaaattccccctttgcattttgcatattagcattatttgctattttcagccagaatttgttcttttcaatcaaataaaaaaaagaatcaaacacgaaaaaatcatactgttcgcgatcattttctagttgcaccgacagttcttttacgataataactgattgtatttttgatcacgaattttattgataaaggtaattactcgaacccaatctgaaagatactgcttttcgtcccattgaaaaagatgcggcaaatcgcgagaaaaatacttagacaaatcaatcgcgtaatcggaaatcacaacatccggtttttgacgaataccgacaataataatcgggcgcggactgattcgcaccaaagtttgtttctgcagctgttcttctagtccccgccctttggactctatcgccacacggataggtagatcgcggtccaccagaatatgataaagcagttgtgaaacataatatttaaaggaatttgaattgattgtctttctccatttttcattcggcgtatccacactgtgagcgatcctttctaggagatcaaaaagataaagatactggtcctcaacctcagaaattgtcatataatcaccgaaggaatcgatttgtttccctaatccaaatgttaataaaaaagaaaaaatatacgtggtattaataaatagaaatcttttttcatcctgcccgaaacgatattgcaaatgctcctctatctgaatgatccattcgtcaattaagcgtcgatagtcacttagaaaagttggtgattgtaattgaatctgctgcagcgtttcttgagaatagctttgtcctacggtaaacatataatagatatacaagaattcatcactaggtaaatccttttcgaaaagtaggttggcttcaaaaaaaggaacaagtatttctttttcgaaaagctctttggaaataaagggattaaaaaactttctgaccgtttccggtatcgtttgaatcaaatagccctgtttaatacgcataacagtcactgccagaaaattgataaaacgctccttgtctgcatgtctaagaaaaggaaagtattcagttaaactttgatagatcacagtcgcacttttttgaacaatcggaggacgattgctgtcaatttcatcataaatatgccaataaaaactatgaaagaaaaaacgaatacgaaactcatctccaattaaatacccgttcttttttaaattcaaaccgatttgatattgagccaaaattggactaaattcacctatttgtcgttggaccgttcgacgacttaggtattgactttgactaaacgattccagggatttgaatttctgattaaaaatagcgtcccaaacaataaagggcagcgttgatttggttaaatccactcgaattttatttagcagaaatctttcggaaaacttaattgtggcttccttattctctcgctctatcgaaaattcagggtagctctgttgaatcgtttctatctgatccaatacttgtcttaacatagaataggaaatactcagttcttctgtaagttctttataactgaaaacagagttatacgatcgatagcagtacgtgaaaaccttttgtactagttgatcttgtccctttataaaagaatctagcatcagaaagcctcctttgttctttataaatttagaaatataacaatatttttattgatcataaataattcactcactgtttttttagacaaaaaaagcagtaaaaaaattttcgaaggataaaatccgaagactttttactgctttcattgaagtctgaaaaaattatgacctatattttgatgctccatcgactaattcattttttatacacatttcatcacacttgatttgtaacagaggcttttttagaaacaacctttttcaagcaatagccgtttccccaagaggtttgcagctgggattcatctaagccgtgctcgcccattttcttcttaagcgacttgataatgccagacagacggctttcctttgctcttgaaggtgcagattcccataagtaatagcacatctccgttctagaaatacattttcctattgattgcttcagcaagcgaaagactcgatattcttgctttgttaagcggtaatcgaaattttccaaatcaatatctttttcctttgtcagcgtaggtttgcttttttgctccgttttctcgcgaattgacatctgctcgcgtaattcttcaaagcttactttctgggaaacaatcaattcgactccttgttgcttccactgctcacgagtctcctcatctagctctgaaattgtttttcgtatgagtctgcagtgaaacaatttcaatgtttctagacaagttgctacttcctgatctgaaatggtttcgcttagaattactgtatcaaaataatcaagctcgctggaaaattcctctttatctgtactttgcaaatccaaaagtacttgattactgcacagcacctcataccctaaatcattcagtttttttacaaaatcctgttcgtatgaataactttttgttaaaagtaagactgtcattaaatcctctcatttcatgttttcttaaatgctcttttttctgacttttaatacaactactcccaatacaatcaataggactaaaatgcccaaagtgctccagatgccactgttttgacttcctgtacttggcaaacgtttagaagtcgtagatgtgcttctcgttgtagattgatgggtcgtcgtattcttcttcgtgatactgttcttcgtctcatcctttgttttttctatctctggctctgctattggcgtattttctttggtaacctcttttacatttggttgattatcttttactgaaaactcaattggtgtcgcatctaattggtacccttttggcgccttggtttcaatcagcttatagcttccatcagtcaaacctttaataagaatcgttccatccttaccggtgacgatcatttcctgaccctcgactattttatcttcgccagttaccaatttaaattctgcatttgccaatctcttgccagttttactatctgtctttttcaatagcagttcacccggcggaatttccttatctggagtgaaatgattcgtgaaaatcggctgctttccagcttcaactccttcgtaaacagcggtagtctcaagctttccagctttctcctcaacagtcacgaacaccttataaatagtgtcatcgtaggtgattccggcctctttttcggctgggatcacttcggaaatcgtatactcgtaagttcctgcttcaccatactcgatcgcgtcaaatgtaatcgttccatctgccgtatttttctggatttgatccacgccttcacctttcagattgaagctgaattcttcggcttttagctttcgacctgttaattctttttacgcttctaaacgaatacttcccggtgtcactgcataggtgttcttgaatgttggtacttctccgacttccatattttcgtattcggctgttgcttccagctcaccagctttttcttctaccgtcacaattactttgtacgttgtctcatcgtaggtaatgcctgcttctttttcggctgggatcacttcagaaatcgaatactcgtaagttcctgcttcaccatactcgattgcgtcaaatgtaatcgttccatctgccgcatttttctggatttgatccacgccttcacctttcagattgaagctgaattcttcagcttttaaaggtcgtccgcttaattctttcttcgccgttaattcaatttttgaagaagcttttcgattttctaaagagaatgtatgatttattcgttctctagaaatgataaactcatgctcttggttgtccttcacatatccttcaggtgcttgactttctacaatgacataggttccataacgtaaattagacagatgatcgacttccgcaccattttcaatgattttatcgccttttacctcaatatttgaaagcatcagtgttagattgccttcagtgtcctttcgataaagatcgaaaaaggctgaacttgtagtaattagctgatcgttctcatctagtttccggaaggtgatcgagccatttttcccacttgaagttccttcaccatctgtagatttcacggttacagttttcgttacttcatgaaattggatgtctttaccataaagtgatgccttgtttgcaatcacttcattattttgaatccccggatctagcaatgtttgatactcaatgatgtaagcagaatcgatcgtctcacctagatgaatggttaatgtttgagttcctgctgcagaatccgaagtaaccacagggctgttttcttctgtaaacacaagagcctcgccatctttaacaaatgttccagaaccattattttttgccttaaagacctttaccactacatttttatcagcgtcataaacaaatgtctgctcactgatttttacagtgtctttaacgactggatcgtgaattgtatgcccgtctttatttaaaacaacagaccaattgattgaacggtagtcttcacctgttccttgttgcccgctcttagaaatccatgcatccttcgcacttttttcaacggttccttcgacctttattggtttactatcctttactgtcatcgtcgctacttttttataggttggaacttcatccgccgcttctgccgaaacaaaaatggcgaaggttgactctttgtcttttaataaagtaatagttggaaccccagcttcatcaagttcgtacgtataatcaacattgacttcccatttcgttcctaattgagcagcttctagcttactagcagccacatcgacatcgtaaataacaagttctttaagcgtttgtccctcgcctaatgcttctttaatcgttgtctctttaggaatggttgttttccatgtattaaacaacgctgtccaatacacactattttctcctgcggttgtttctaagaatggattattatgactaaaggctttggctacatctgccccttctgtaagatatttcccatattttaaaccattaaatgcgtactgtgcactcacccacgtggcaagttctgcaccatctgtatgattttttccatcttcaccggtatacgttaccactacgctattatcaaatctctgtgtagtacccgtatcatgatgtggctgtttgtccatgaagaaatgtgtgtcataattaaaggtgatttgatcgcttgttgttgcataagccccaattaatcggatattaaatcctaatgagtaatcttcatcgccatcgactttttccagaacgtagtcgctatctttagttaaaaccttatcagtcgttccatcgttagcttttactacaagcgatgattcaatcaattgaagcgcactcttatttattccagaaagagtggtgtatctatctttgatgatcgcatctttcattaaaagacgatttttgttcaatactacctgccagctgattgtgttcgtcgcataattcttactcggcgctgttttggtgatgcctaatgctccttcaacatctgttgtttcccccgcattaatttcttcactttctgttccatcaataatcaaagcagtattctgaagagcacttcgtaatggcgttggcacatcaaatgtttgggtcgaatacttcactttataaacgcctttttctgcaaaatttaacgtaaagtgtacatactctccgtttttttctttataatcagcataatcagccgctgcttctgaaaatgtccacttatcactagcgacttcattgccattttcgtcatacactttgatgctgtctttcaataaataatgttttgctgtattcggatcaccatatcttgaatacatccagtccttaagaattccaccatcagttgtatacgtagctttgatttcccagttgaaaataccggtatttaaatcataatccgtacaatatttataattgtctctatcatcgaaagacacactcgcctctgccgaattagaaataaagttatctccgctaatcgttgccttattcagaaattctttttgctttcatcagccacccgcattttaagaacaatttttactggctgattcatcacaccagaggtaaatttgtagacataatctgtgccagctatccaagaattaataaagcctgctggcggtattacccattcaccattctcattcatcacataatcttgggtataccaaacagataatccttcaggcatcgtatctcttaaaaccgcgtttctcagatcacgtctttcttcatttaagatgatcgtccatgtcactgagttatcagcttcaatttttccgcttttactaatgtccgcttttacgactggaatgacaatcctaatttctactccagcctcatctgtgatccctgttgaaatctcaattgtttcattttccgtagtaattttcagttctgttcttaaatcaatcgtcccttgacgctcgcttaaatttccagctttatcattaaaggtgacggttaaaagcccatttaagtctaaggtgaatgaccctaaaacatctccatcctgatttttcagcacatctgttacggctttatgaatagaaaaatagttgggcagctgatacgtataaaaatcaccattttgtataatttctgcatcatctaacacccaatcaaaatgaatcttgatattagcatcttgaacagccggattttcctcattaaactcttggtcattaaaatccgtaattttaatattggtaaataaattcacgccacgagcgttcagatttgcttcatgatccgcccgagcttgtcttttagctattgtctggtctgcctcagcttggttgacgatatcggccgctggatctgaagctttgttgtaatatatactggtcaacacattattcccaaaatcgattgtttctgcttctacattttctgatgtagtttctgccgttacctcaatcaatccttcataaaattttgcactagcgaaatctggtacacgtccatctgccgttttttgataattttgtttgaattgaaagattagttgttgattttttacttgataattccccatctcgcctaaactgcctgattgctctggataatgcaggtttgcgggcaactcaataatcgtggtggtattttcctcaatcaatgtcggttgtgccagtgcccaacttaaactcagtttgacagccgtcttttgatctatccgatgattctctgtgatttcctgatcattggtatctgtgacagtcacttgattaacgactactcccgtttgatccgcggtttccgcaatagccgacatcggaaaaagactaatcatcatgccaattattgcagacaacgaccaaagcttttttaatcgtttcatttttcacaacctccttcctacgattagtcaagagaaacgaagaagagcctctatttatttttacccacatcaaatagccctcactttgcttttttttttaaaggagggaaaatcgtggtataattaccctatattaatggtccgttgagaccgtgtacgagtaatcgtactttgtcccattcctaatcatggcatggagacactttagcagcttgttcatacaagctacgatggcaaccttttcttttttcgggaggggttgcttttttaatttgtaatagtaatcgacaatgtgatttggagcagcgtgttgtgcttttatcatattcttgacaataaaaaagagaatttttcgaccctttggatttccacgtttattgatgtggtcttgtgctaaatagtttccagattgatagcgccttatgtcaataccaatataagcgttggcctttctgggatcagaaaaccgtcgaaggtctcctagctcaccaatgaactgggcagcactgagttcaccaatgccaggaaaactagcgatcactgaaaattcttccaactgtttggctgtttcaatcatttggttcgctaagcgttctttctgatttaaaagagcttggagctgctccgcataatagcgtgtttttgcgacgggtatcgccgtttcagaaacagctggataggaatctttggcataagcaatcagttcatctgctttgtttcttgcacgattctctgagattttctttgcggtagaggccattagacgatttttaatgattgtcctagattgtttcagtacgaatgatggatgagggtattgagcgatcatcgtcaacccatatggcgtaagcctgttagacaagacttgttccagttcaggaaaggttagttggatggcgttgtgcaaatgcatgcgcatacgtccgatttcatccatgatttcttgatagaatcttgaaaggtctctaagttctttatagagaggttcagctgaaacagacttcgtccttgaattattccaatgagtttgtgctaatcgatgcgcatcccgtttatcggtcttccattttctcaaagattccttttccatctgttgtttggcttgaagtggatttaaaacataatgaatcaactgattcttttgacaaaaagtttctactggtcgagagtaaatacctgtcgattcaaagacaatttccggcacttcaggtaaattcttaataagagcatgtaattcttgaaaaccgcttttggtatgcgtgatttcaccttcataaagacacgtcatttcttgatacatcacataaaaactttttccttttgaaacatctagtgcgacaatcgttgccatacaaatccttctttctgttttagaaagttcttcactactcattccgattccaatttcctatacacgggctcgaagccccaacatacttaaacctgattcaagaatgtaagtgaagaagctcgtttttaaatgcgggcttatacgccgcccatgaggttatgtccgagctttctctcacttctcactataatccaaaaagaaaagatagagggacgaatcagccgtcactgattcgtccctctaatcttagtatgttttaaatgtaaataatttgcttaagcgttgattctccgccttaaacaaactaatccattaaaatcgtcttatagctttttattatttttccgcctcctttattactttcccagcttttcccaaccttttgactagcttttcttccattttccaaggctacagatctgagaaaagccgcttcaatttgtacaataaataggctctttctcatctattattattagtcaaattagaggtctgaaaatgacaaaaataataaaataagtctatattaacgtcctattcaaaatataaactttaaaagagcaaaaaaataaagacctgctatcataaacagatctctcgtttcgtatttttctttccaaaatacacgccgaacattgcttcttgttttctattcatttaattaacggactttagaaaaaaattattttcttgtcaactaacctttatatttaatttacaaataaatttttatcgataacctaaagaaacgttgttatttaaacgtttctttagaagaggccattttctgttgttatcgaatgtttttttgtcacattcgagaggagtctgactatatgttaaaaaaatctggttttcattcctaaataggagcttctgaccgcagctacaaaaaaacgaaccgcctataaaagacaattcgtttttctttggattaaatttagctttataatgttctcacggtatccacgatactttcatgctcaatgttcgtaacatcaaagtgcaaaatattgaaggtcgcctctaaaatgaagctgattccaaagaccgaaataactgttccgattcccacctttgctcccaatagccaaccaatcagcagcaccgtggcctcgattacaccgcgaacaattccgatgggaaccttcggcagacgttttcccaacgcaaccatcaaagcatcacgcggcccgcagccaagcgatgccccaatataaaaataacttccaatgcaaatcgacagttgtccaagtaacagcatcaagatgccagagaaaaaattgttcatttgagggatcagatccacagcttgaatcagatccacgaaagttccaatcagaatcgtgttaagaattgttccaaagccaattttttcctttaaagctatatcaattactaaaatgacaaatccgctaatgattaaaatattgccatacgtttggtctgtcagataagctattcccatactgaaggcctcccaggaagccaagccgatatttgcctgaatcgttaaaaacgaacccaatgcgaataaaaacaaaccaaataccaacttcaccaaccgaacactataccctttcattcaatccccactttctactccctaaacatcagcatcaaaatatgtgtttcctcattcgtcggattggcatacttgtgattgcaatttgctaaaaattgaattgcttctccttcttctagttcaaaactcttttcaccaacctgaatagccaataccccttgtgtacaaataatgtattctctgattccagcttcatgatattcagataagcgctccgagtgaggcgcgatcacatgacgcatcatttcaaattttttatccggatcaaactcaaacaaattatacgtatcaaacccttttgaagttgaataatgcttactattactttttctgattactgacacatccggtgtttctatataagtcagctgggctaaaggaatatgaattcctgtacaaattttctctagcatcgaaatcgtcggacttttagcgcaacgctcgatctcacttagcatactcttactaacgccggacaatcgcgccagatcatctaaggtcagatttctttcttggcgaattcgtttaatatttcgactgacaatttcatttgctgaaatcataacatcctccaattactatctcgaataaaatccactatagtgtaaatttaatagataacatcgtgtttgtcaacatcactaaaggctgagctttatgttttccttaattccaaatacacaacaagcgcttgaaaatatgtttattttctcctatacgcgtccccatttttactcttttaagcatatttctgttcaaaaaaaagttatcctttacactattttatacaacaagcattactttatagataaacagattaagtttcttattatttccttcgtatctttagaaactaatgtaagagctaaacgatcgttagtaaagcattttttaaatttataaagttaccaaacaaatttttactggtgaataaataagcttttattgacgtattttagctttttactattcaataaaatcaccatccaaaaccaaatacaatgaactgttattggttcatgtaaaaaataaataggagtgaatattgatatgtttttacacaaaaaggaattacagtttgaagcaaaaccggatagtccgaatcctctaattgcgaagtatcttcaagaattgattggtggacaatacggcgaaatgagcgttgctatgcagtacctgttccagggctggagcatgcgcggagaagaaaaatacaaagatatgctgatggatatcgcaacagaagaaattggccacgtagaaatgttggcaacgatggtggctcgacttttagaaggcgcccctgttgaagatcaagaatcagcaatgaaaaatgatcctgctattggcgctgtaattgctggtatgaatccgcaacaggcaattgttgctggcttaggaccacgtcctgctgacagcgtaggaaatccttggagcggcggttatatcattgccagcggtaatttactagctgatttccgagcaaacctaaatgcggaatcccaaggccgcctgcaagtagccagaatttacgaaatgattgaagataaaggcgttaaagatttactatccgtactattagcccgcgacagctatcaccaaaacttatgggcgactgctgtcaaagaactagaagaaaaggaaaagagtattttagttcctagtacgttcccaagagagaatgaacgtttagatatcgcttatgatttctacaacttttctgaaggcgaagaaagcaaaaaaggcagctgggccaaaggaaaagcattagacggtgaaggtgaatacaactacttgaaagaaccaaaagtagaaggaaaagctcctaagcttgatcctgttacacctaagatgtacggtacacccccagctaaataacaatattaaaaatgaaccctcagcgattttctcttgagggttcatttttttgtgttgtttttttacaacatgctatccataaataaatcgttctagaaaattgtcggtaccaaaccaccatctagacgtaatgctgctcctgaaaaggatcgcgcataagggctggaaacaaaggctgcaaagcgaccgatttcttctggtcggatcaatcgttgaatttgagacaatggtcgatgatttttcataaagtcgctttcccattcactttcagggatatccgtgtcgctatacatatccaccaacatctgctgcacgccttctgttaaagtggagcctggcatgatggtattgactgttacattggtttactttgtcagcttggataagcttttagctaaagaaaggttcatcgttttggtcaagctgtatttcggcatttcaccagagggcataatcgcctcttcactcgcaatgaagataatcctgccaaaatcagtcgacaacatttcaggtaaataaaacttcgccagtgcattgccggaataaaaattcacatcaatgaaatgctgccaaagctcatctgtaatatcaaaataatcctttggctgaaaaatgcccatattgttgattaaaatatcaactctcggataagcttcaaacagtttttgacgctcgtcttccttagataaatcataggcagctgcctgtggcattgtttacgagaattgtttcgtaacttccattactacttcatccactgcctgactattgcgaccatttatgataacatttgccccttcttttgccagttcccaggcaattgccttgccgattcctttagttgaaccggtgaccaatgcagtttttgcttttaaatctaattccatttttttctcctccagtaatgcctccattaaaaatcgatgacatttattcatagtaaccgaattctaatcgctactaagagcaactgtcaattagttgagcttctatcgaatttaattataatgagaatttactacctgatcctttaggaaatttttttgtccgcaaacacttcatgatagaagtatgcataactgcctgctgctaaattcacttgtttctttaaaaaatgtcaatcttcaatcgataaacatagccagtaaatcaaaaactgaaccaccccataattgttagtctaaaaaaaactaattttccggaatggctcataagcttctactaaaatagctttgaccctatttatctagcagcaacatcgtccgcttcgcccactctgaatccttcaaaatcgcccgaccaacaccaatcatatccgccttttcttcctgcagaagtttttccgcagctgctgcatcaatgattccacctgttaagagcactgggatcgacaccttttttttgattgcttctgtcaaatcactaaaatagccctgagccgaattatttggattaatatatgaggtaagtccgccggaaatatctaataaatcaacgcctgcctgctcaaatgcttccccggcaagaatactatcttcgatcgttgcacctccagttgcataatcactggcacctagtcgaagcgcgatcggaaaatctgagcctacagcttgtcgaacggcagcaatgatctctaaatgtagccggattcttccttcaagcgaatacccattgtattgatcctctcgcttgttagttaatggagaataaaattgagtcagtaagtaggcatgagcagcatggatttctactccatcaaaaccagctttttttgctcttaaagctgctgccgcaaaatcagcaataaccttttgaatgtctgctgcggtcatttcaatcggtagtgctttgtttttggcaaattttggatggtcgacggaactcgcgcttttcggcaaatcgccaatgatttcttttttgctacgggcaccggcatgattaatttgtgcaaagactttgctgcgatgttgatggatcgtctttactaattttttcagaccaacaatatcactatctttagcaattgacagttggcctttgctggcttttccttctggacaaatataactatgctctaaaataatcaaaccgatataaccacctgctgatttttctgcataataatcgcaaagtgcctcagttacttctccgtctccctgcgctttttccgttgccatcggtggcatgactagtcgattcgctacatctaaacagccaattttgatcggtgatcctaagaaactcatcttttatcctcctctgtcatcgaaatttccgattcatttataccttcagtttatcagtttggtacaaacgatcatagtagcttttgaaatattggtacccctattcccataaacaaaaaaatcctcctagccactatgaaaagtgtttaggaagaattttacttactctttcgtcaactcacgcataaagaaaaccgtatccacatccatcaaatgataatcctttggcatctctgatttgtcaattaattgaaaatcatgcttcttataaaatttctgcgctgcttttaacacctcaaccgtgcccagatacaaacgttcataaccttgatgcttgcaataagcaacaagcgtctctagcaacttgcgacctacttgcttttcaccgcgaaactccttagctgcaaacattttcttgatagctccgcagtgattttccagcttaactaaggcaatcgttccaatgacctgatcattgaaaagggctacccagaaatttccgcctgtgtcgatatattcttggttgattcttaagagatctggctgatcctcgatactaatatcgatattaaattcgtcacgttgagtcgggagaatcaaatcaacgacttgctgtgtatatttctcttcaaatggaacaatctttatctcactcatccaaatcacgcctttataaattttagtgttttttctgattaataatagatgataaaaattttactgaccactttccagctcatttggtacgactcgatataaaatcttctcgatggttttcatagcagtgactaactcttgatagtttgcctcatccagaggcgctaatagctccaatactttttgatccgattgttcttcaacatatttatttaattccagacccttttcactaagaaaaagatgcatacttctgctatcatcaggttttttctttttagaaatatagccccctccttctagcttacttaattttcgactaaggtaactttttttgatattcaaacattttgtcagttcattcgcggtaataccgggatggcgaccaatttcccctaaaatgcgcatttctatcattgaataattcagatcaaagactttttgatcaaacactccgagaattcttgtgtagtaacgattgaaccttctgacatcacgggtatccaaaaagggacacctccttttgcggaaatagtttactttgtcaactttatcaaagtataaatcatttagtttactttatcaactatcttgcgataaaaagtggcttctcctaaattatcggttaatcagaagaaaagacttgtagaaatgcgaagaatgatttattctatcggaggtacgaatcatgcaacattaggaggagatcatgatgacacattcatcttgtatcgtacgctcaaagaactatcttacttattaaacgattagttctttgacggaaaagcaattttcctcaaagaaagaaatgaggaaaatcaacaatgaatacagaaaataacgttttaaccccttatgaatactggtattgcaagcagcagatcagcgaacttgtcagcgcctatcattccgtaaacgacaagcaaactgtcgtcactttacaaacattgatccaaggaaagaccgaagaatttttcggccgcaatcctttactcgccgcatattgggaacagtttatgaataccgctctcacacgcgacaaattcgaaaagctgtttgaagagatgaaacagttcgttattccgatggctatcccatcaacgaagcagattgaaaaaagctttcgtaaagtcaagaaaatgcagcatcctgacctggaagcgaaagattttcgagaattaagctatttaggctggaacgatagcggcaccaatcgtaaatacttgcttcgtaaaatcgacggacgttttgtcggtgcctatggcagctttagtactgatgtgcaaaaaggccattgtgccatctgtaatcaaatcagcaccgtcgctttctttttggcaaccaccaaatccgcaggagacggaacctacaccaaaaaaggcaactacatttgtacggatagcgatcaatgcaatcgccagctgacacaaatagaaaccttagagcgtttttggtacacagtaacaaaataatcaaattaagagaacggttgtgacaagagtgactagctgcaaaaaaaatcggcttgttttcgaagaagctacttttggaaaaccatttgttcggaaaaaggagctgcgacatgacttttgtcacagctcctctttttgctcttatttaaagctaaaacaccttgttacctttcaactgaactcaaggcaacaaagtgtttttatactattttatttttgatcaaatacgcataaaccgccccatagattccggcttcattccctagctgcgctttctttacggagaaatgtgctttgatttgcggaaacacatactcctctagcttttccgtaagtggcagcagcaattgctcgccggcttcagatagcccgccgccaatcacgatttcttctacatcaatcgtgttcatgattcctgctaaggcttgacctaagatatcgatgaattcttccaatactgcctgtgcgtggaaattcttttgggctgctttctcaaaaaccattggcggcgtgatttcccgccacgtttcactgacttccaccagcttctttcgcatgcttagcgccaacgcctgtacctagtgtgacaaacagcagattcacgttaccctgagctgcgcccttccacatttcacctagtgcggctgcatttgcgtcatttaatagacacacgcctatacctaaatcggtttcgattatttcctttaatggcaaatccttccaatccaaattcaccgcttgaacaactgttttcccatctggcgagatcggacccggaactccaatcccgattcctttaaccgtcgctagtccagcatcttcaagtgtcattcgaatagaggcgcaaatctccttaggaatatctttccctttttctgcaatattggttgggatcgaccacttcttctcgattgttcctgcatcgtccatcaaggcaaacttgatagaggttccaccgatatcgatcccaattagtctattttcttgtgttttcatctcatcacctaaacaaaattccgtaagtaatgagtactttgtttgatggaacgtttgacatcttcataatcagactcatacgcccgatcctctacttcaatacaagtatagccgctatagccaacatcggttaacgccgaaacatacttgccccaatcaacgtcgcctaagcctggtaatttcggtgacatgtattctaacggagtcgccatcacgccgaccttttgaagcttgttcctataaactttgatgtccttataatgaacatggaaaagcttgtctttgaattcatagatcggagccaaataatccatttgctgccaaacaaaatgtgaagggtcgtaatttaagccgagataatcactatctaaaaggtcaaagatttttcggaataatgcaggggttgtcatcaaattttgaccgcctggccattcatcttcggtaaagagcatcggacagttctcaatcgcgatcttgactttttgcttttccgcatacgctaaaatcggcttccaaactttttccacttccttcaaattttcagaaattgtttttgtaggcattcgtccgatgaatgtcgtcaccaaattgatctccattaatttcgccgcatcgatgactgaatagatatgatcaatcactcgctgacgtttttccaaattctcgtctaacggatttggataataggccaaggccgagattgcaaccttcttttcagcagcgtaggccttatattcctctgcttgttcctttgtcagattttctgtgtcaatgtgtgaaacgcccgcgtagcgacgctctgcttttccagcaggccagcaggcaacctccacacaatccaatccattttcagcaacgatatcgatcatctcataaaaatcactttgatctaaaatcgctgaaaccaaccctaattgcatgttccttccctctttctattcaaagtctactgaacggtgttccttcgctgagacgcgaatcgcatctaatagcttcattaagcgtaatatttctgttggcttaaccactaattcgccttcgccctcaacgtaacttctatactgatcaaagaacatttcatgattgactgaaacctcaggaagttcttcggtgactaggcggccttctggcggtgggccaaatgaacgggtaggaccggctgccgtcatagtaatcttgcctggaacattcgttaacaattcactggttcgcacgattttcccttggggtttaaatccatccacgtatgcactgcccttatttcccccgacaaaccaatggcgttcaaaccatgaagcttcgtcttttagaaaatatgtccctaattctacttgaccagtgattccactatcaaaataaagctggatattgaagtaatcgtcgacgtttttattaatgatatttcgcacatccgcataaaccgtcttcaatttccctggaatcatccacagcatttgatctaacaaatgcacgccccaatcataaagcatcccgccgccaaactccggatacacatgccaatcgtgcatatttccattaaagccgtagagacaatttttaatcgtataaatatcgccaagcgtctgactgtcgacgacttccttcatcaaacgataatccttgtcccaacgacgttgatgatgaatcgtaaagtgcacacccgctttttcaatgatttccatcatttcttgaaattctgtaccattcatcgccgcaggtttttccaaaataatatctttttttgctgcagccgcttttttcaccatttctaaatgcagatgattcggcaccgcaatgatgactgtgtcaatgtctttttctgctaataattgatcggccttcaaaaaggtttttacgccttcgtctacttcctttagctggtccttattgatatcacacacagcgatcaaggttgcataatctaattttttgatggtttgcgtatgagtctgacccatgaaaccatgtccaatgattccaaaatttaacatctttctaaccccttctcttaaatcgtcaccgttcgttctttcacaccgactaacggcactggaatatacgctgttctagtagccacggtcaattttacttgatgatcgcctgttgatagtccgcctagttttaagacgcgaatatataagggctcaccatattcccatttataactggtaacagttgttgcttcttttaaatagaaccaatcttgctgatcgattgaaatttggatgtcttctgttgagacttccgcatcatctaccgctactttaataaattccaccatggaaagagggacaccacgataatacgtaatcagcgtttgtaattcgaacccgatcacttcgcccttttcttcaatatttttgcaggtagcctctttaaacacattattgtcaaacattcttacatcctcctatccttggatctcttttaagcacgcctgcaagtatttttggtttgcggccacttgttctttttcctgcattggtttgcctggcagtgtgaagcgattgccttcatattctgttgccacgtaaccgtcgtagtttttttcatgcaggtattctaaaagtcctttgtaatccattgagtattcggggccttcgggggtcatttcaaacattttgatatggaaatgcttgatgtacggcatatactcgtccagcacggtaaacggataattttcatagccatcgcaaagcggcgcaaacatttgatcttctttggttttgatgacttttttaaagtcttctggatattcgccattgttttcttttacgatacggtgaaggtctgttccctgtgcaaaaatctcatctaagtaagcaaacatttctgggcttgcgccattattgacttcataattcaccactactcgcgggaattttttacagaaaattcctgtgtcgatcactaatccgatatatggagaatccaaacatttcatttcttcgataaagtgaagcgtttcaggttcatcaaaggccattccggcatgaatctccaaagcaatcgtcacatcgtattcttcacaataaggcagcaagggttcgcaaacccaataaggcaccattgaaactaaacgaatcaatttgattcccaaacgattggcttgtttgatttcttcgatcaataaatcaatacactcgcgttttgttagactgcgattgttatagagattggtatttaaaaaaacatccgcggtaaccggcttaattcctgtttcttctaaaagctgatgccaatgggcaacgtcctcttctgtcggatgcggggcttttttgatcatttgatctggtaaaatctcgactccttcaaccttgtgttcctgcaaaaagtgcatcaaatcatctaggttcatgcgatgatttaagtattcatcctgtaaactatataaacttacagccgttttgattttcgacatttgtattcctcctacgaataattaataaagatgatgggacgagcgactgctttcaattgcgctcgtccgcctcattaaattacagttccacaacttttccagtttctgcagatttgtaaatggcttctaaaatttgtgtcaccacaattgcttgttctggttttaccaacggctctgtatcattcaaaatcgcttcgacccattgcttcgcttccgcatccttttgctccaaactgctgccttcaaagccaaagacgccgccagcatcagaaggttgcgtttgctccaattgattgtgagccgctttgttaaagaccacatatccttgatctaagaaggcttttccaaacatttccgcgccgccttctgtcccgcaaagtgtgacctgtgcttccttcggattgatcatattcaaggcccaagccgcttccaagaagatcgttgcgccattttccattttgattaaaccgaatgcggaatcttctgtttcaaaggattccggttcccacggtccaaacatattcgccattggattatccttcagtttttgatacgtcgagcccaaaaccatttttggtttgtaattattcatgtaccaaagggttaaatctaacgcatgggtaccgatatcaatcaacggaccgccgccttgtttttctttatctgggaatacaccccaggtcggaacaccttttctacgaactgcatgggcttttgcaaagtagatttcgccaagctcgcctttactgcaggcatcataggttgctaaggaatccgcacggaaacggttttgatatccgatcgttaattttttgcctgtgcgttctacggcctccagcatttttttcgcttcttcatagttgatcgccattggcttttcacacatcacgtgcttaccgctttctaaggcatcaaccgtaataaatgagtgagaaatatttggtgtcaatacatgtatcacgtcaatatcagcttgcttcaccacttctttgtagtcttctgtaactaatgcatcggcaacaccatattctgccgccgcagcttctgcccgttcaatgatcgtgtcgcaaaatgctaccaactctacctgatccgctaattttgccaaagctggtaaatgtttttggttggcgatcccgccgcacccgataataccgaattttaattttttcacgttgttttcctccttgttcgtttttacactgacatccatacactattagccagccgtaatcattttattgactggctaaatggatatcgcttacaaaatctagtttactgaatgatgcctcttcgtactcttcaaatcgtacgtttaaagatcaaacatttttgcactatatcttcattctttttataatgcacaaatttataccatacttttatgctcaatcattgatattctcgcgttttttatctagttgggcacgaatatcatccgtatccttgtcgcttaagttccataacagacaagccaatgcagcagagaaaaataggattgctggaatcaaattaaccactagattgatgccatttttagtcgccattgattgttccatattggcccgatagccgaatgaatgcagcagcatgattcctaccgatgctccgatagcgttaccaatttttgtcgctaatccataagtcgcataagcagtcccgtctgttcgaacccctgatttcaattcttggtaatctacagaatccgccactaatgaaagtgaaatcggaaagcccatattgaacaatccaaaaattacatgaccggcaataatcattggcaagttgtcaaaatcagcaaagtatacgacgagtaaaccaatcccttgaagaatcaaggaaaccatcaacacattacgtttcccaaaacgtttaaccaaaggaacaattgctaatgaacaaagcgctccgccaatggatggaatcgtaatgagtaaggcaatcaaggtaaacgcacctaaacaataaatgacataaaaagttgttacagcgattcttcccataaaagcagtcatttgcaaaatcatgataagaaaaacgatcattaagtatttattaccaatcacatttttaatcgtggtacgaaacggtactttattttcatttctcatcggttgaacaacttctcgagatgtcgcgaataccgcgaaaaacaacgggatcgaaattaccgcatagatcaacgctgtcataaaatagcctcgaccagttgctacctgcgaaccatctgaaaatgccagcataataaacgaagacaatgagttcacaataatcattccgacattcatcccaaccgagcgccatgcatttaactgatttcgttcattggcatcttcactcatcaccgccgccaaagccccgtaaggaatattcactaatgtgtagatcattccagcgatgatataaataaccgctgcccaaatgatacctgccgttccatttccaaacggaccggtgaaagtcaaaactgaaaacagagctaaaaatggtgagccaaaagcaatataagggcggaaacggcctaacttgcttcttgtacgttcagcgatcatccccatcatcggatcattgattccatcccataaacgggcaattagcataatcatcgaaactgcaaccggagccaaaccaacaatatccgtataaaaaacagtcaaataagtgccgacaaatgtccagacaaactggctagccaagtcacccaatccataagcaatcatagaaaatttcgttaaaccctttttctccatcttcattccattttcaaagacatctttttccatgtgatcctcctagaatagttgcatttgcaaacgtttacaacgaatagtttaatctgtcagccaaaacattactctgcttttttcattctttctattgatactttcctaggatgatggctttgaaatccacaaaaaaacaagattgtattacacaatcttgttaacgagagactttttgaatctcaatcaattgaatgtcctgcggaaaaagctctaactcgatttttaactgatggtttctagactgcccttcccttatttccagctgcggctcacaacgatgcttcaagtaagtgatcatctcatcatctaaccgatcagagctgctgatctgattaatttcctccagaatattgccggtcttttgacctatacgataatatttgatacgatagtgactttcttcttccttcaaatccttcaacagcacctgtttcgtctgaacatttccagaagcaaacagagcggctgcatttctcctagtaaagacactgctatggtcataataataagtagaatttaaatgactataagaatagcacaaaatttgtatcttgttcggatcatccttcgtaatcaatagatcctctgattgatacacgacctgattacctaatcgatttaagaaacggtaggcatagtagccaattttcggtataccgcttttagaaatcaaaccagaaccgccaaaaatctctttattggccgtatcaaaggtcgtcaccgacaaatccgtcagctgccaatagccgatcaaatcacaataaggcatcgcccctaaagcatttttcaagatatagctgcccttgaaggccgtatcgttgataatatcgcgacttaaaatggtcacattaactccgtaatgaatgtttttccctgataattgatttccgtcaaaagctctttgaaatcctttatgcgatgaagcatgtaatcagaattcggtgaaatcggctcatgatgctgctttttctggttcagctgctgtttcaccgcatccattggataaatcgacaaactaagaaaatccggtgcgcctttccccgttgtccactgtgtcagaaacgtgcttaaatcgcgcgtttcaatatctaagcttaagccacagccgccaatttgaatcattggtacgatttgttttacagctttttttattttcgaaaagacatcaatataggtcttttctttagctaaattcagttgtgccccatcctgatcaattcgcatcaaatcctcacagccaattgtcttcaaaactaaaggattaggcttccaaatctcgatcatccaggtagaaacttcctctaaaccaaatacatccacacaatgatggaaaaaaacttggaatcgttggatcaagtcagatagcttataggattttcggataaaaggatgacttttaacaatctgcgtatggaattcatgaatcagttttcccttgaagccgagttctaaaaatggtttgattcccgcctttagcatgattcgtaaaatttcatcaactgtggaaaaatcgtaagcctcgcctacctgctccagaatttcttcgcttaacaatccccatatacgtccataattaaaaggattattttcctgcaaataatgaatttgttccgcaaatgaagcatgagtcaaatcaccggcgtagccaagattaatcatattcttttgaaagttttgctttgacgatgtctgcatggaaacttgaatcgtctcatcactgattttcgcatccttttctttaaagtaaatttccaaatttcgaaggtctttttcttcaaggctattttgcttcgaggaaaccttagccttcgcttttgtttccttacgaaattcactcggcgtcaaaccttgatacttcttaaataaacgattaaatgagttaatattcgaaaagcccgctgaaaaggctatgtcggtaattgatttctccgtttccagcaaatccttccgaaccttttccaaccgtttacgaatcaggtattcattcattggcatcccgatttcgttagaaaaactgcgagacaaatattgatcggaaacatacagcttattggcaatatcgaccaatcgaatgtccttatcgaagttattatcaatataaaatttcagttcatagactttttgcttcatgcttcgctcttcttctatagtagaaggtttcgtgtattccttttccaatatctgaagaatatgaaaatactcctcaaacacttctgaaactgtatgcttttcttgtaagacgtatagctttagcaagcgttcaatcgactgaatgacttgattatctgctcttttattctctgtgaccgagtttccttcaaacacttggttctcttgctcttcaaaataatactctaaaacaatctcaaatgcccgcgcattttttgtataaacagtatgtaccaatgattttgacaaaatataaaaatcatttttttgcaatgaaatgattgttccttctttttcaatcgtcacttcgcctgccaacacatagattaaatggatatttaaatcaaaatgctgcatgattcgatcttctgctaatacatttatctcaatattttcccacggttcaatcaaacgcatagtgcccctccttgtatcgctttctaataaacaataaatcattatagcgcctttactattttcgagaaagcgtttttctatcctcatcatacatgagaacagtctgaagattctagcttacttaaaaaatttacgcctgattccccttttttacgcacttcaaagctgctaatacacaatattcttctttcacacactaaaaaatctgtactgctccttttgccaaaattacaaggcctgtcagaaacagtacagatcgattacctatttttataaaagaacttatgcatttgtagatggtaaaattgtttctacttctgaatgcggacgtgggatcacatgaacagataatagttcacctacacgctgagccgctgctgctcctgcatcggttgccgcttttactgcgccaacatcaccgcgaaccaaaacggtcacaatcccgcctcctacacgttcttttcctactaatgtaacattggctgccttcaccattgcgtcggccgcttcgattgaaccgatcaatccttttgtttcgatcattcctaatgcatctgatttcatttttgtattcctcctaaattaatttctgatttttattgttgttcctggcgtaacaccaagagcattggcttcttccgtatcaatatgacactctaagcctgaattcgcagtcgcgcgaattactacattgtttaagcttccgccgcgttcaccagcaaaatcgatcgtcacgacttgaccatcagtcacgccaaaacgttctgcctcttccggcagcatatgaatatgacgtttggcgataattacccctttagccatttcaaatgcgccattgggaccaatcaatgttaagccaggtgtaccatctaaatcaccagataaccgtaacgcaccctttactccaagtttgaacgtatcgctttgtaaaatttctacttgcgtttctgctctcacaggacctaaaatccggaccttttcaattactcctttaggaccagcgagcgtgacacattctttgcaagcatattgtcccggttgcgagagatcctttagcttagttaattgatagtgattgccaaacagcttctctaatgcagcttgacttaaatggatatgacgatttgaaatccctactggaatcgaatcatcatttgggacatcttcaggatttaaatgcgccataatggcatttaaaatcacttcataatcttccattcctactccttcaattctttatttgcttcaatttaagcattcatttgggttaaaaatttccgcacgacttctgccaactctgataattctgctgccgaaaaatccttcatacttgaattgtccatttccccctctgatggctggctcgcttccactggctttgcggtcaaacaggcatctagtggctcttccagttctggatgagaaaaactagtatcctcagccaataaagtcgtcacgtcctttaagccgtatgcgacttttttaatgtttaataaatgcttcggactaacattttcagaaacagagctgccgccaaaggttccacaacctagcgtgaaggaaattggcaacccagtactaattcctgttcctccttggctgcctcctgtattcactaaaatgcgtgaagccggcttcgccgcaaatttcaaaacaatgtcgcgattattcgtatgaatactcatggtatgcccgataccgttttgtaataattcgatgctcaagtgacaggcttcctcccaatccctgacggtataaaaggctaaaacagtcgttaatttttcaaatgacaacggatttcccgctccgacaccgttttggcgaccaatcaaaacagtcgttgaatgaggaacagtaaaaccggctgcttctgcgatcacttgcggcttacgcccgacaaatttcgcattcatcgcatgacccccgcctttgaaaagcagcccgcagacttttgcggtctcctcttcagacataaagtaaccaccttgagctttcaattcagcaataacctcagcttcattgacctcttcacaaataatcgattgctcagaggcacagatcgttccattatcaaaggttttacttgcaataatttgtgaaacagcctttttgacatcagcgcttctctcaatataagcaggagaattccccgctccgacaccgatagcaggttttcctgaactataggcagcctttaccattcccggcccgccagtagcgataatcaagcttacttcatcagcatgcattaattcatttgttgacgccatcgttggtgtcgagacacagctaataatgcctttgggtgctccgactgcttctgcagcacgactcatcatgcccgcagccttcttcgtacattctgcggccgcaggatgcggagcaaacacgatagcattccgtgatttcaatgccaccattgccttgaaaataaccgttgatgtggggttggttgaagggataattcctaagactagccccactggttccgccacatcaagggtccctttagtcgtatcttcagcaataatcccaacggttttttcatctttgatttcttcgtatagcaacgttccggctgcatggttcttgtaagccttatccgctactgttccaaaaccagtctcctccacagcagctttagctaaacaaacagaaaatttttctgctgcttccttcatgctttttagaattgcatcaacttgctcttgactaaaggtcgcaaattcttgagcagccctttctccagctcgggctaagtctcgcgcttcctgtacggaacataaatctttgtcaaacttgttcatttttatgtgactcctttagcgctaaaatttttaaacagaattcttctcatcagtttggcggaaatgcagcctctgaagacagtcactagcctttttgaaaatgtaagctcaatgcagaaacaagctgttccttattggctgtatgcacatcttttttactgatagcaaaattagtttgctttttcgcaagttttcgcaggtcaataaccttcatttcagttaatgctgcttccatttccgctatttttccagtctttccccattgtgaaagtgtagcccctgaaattattgggcttaatgcggcttctgattcctgactaccttcaataattgtctcttcatgattttcatttgagattaacacttcttccgcgtcctgaggtgcctcctcaacaatagatactgattcatcactagactcctgagtctcttcctttctttcaaaaaggcttaagcttttatcaggacgtggaataacgtgagttgttacgagtaaagttgcctcgagctttgtcacagcggaagccgcagcatccactgccgttttgactgctcccacatcacctgagaccattaccgtcactagtccaccgccgacaatttctttttgtgttaagctgacttccgctgttttcagcatgacatcactggcctcgattgcagccaataagccctttgtttcaactaatcctaatgcgttcattgtctactccttcatcgtacacgttgtcggcacaattttttttacagcaaatctgaccagttcgctggatacgttgcataaaacagcctcactttatcattagaaccccaagtgactttgctgccttttggcacgaaaacaacatctcctggacatgctgtaaatttttgaccttcgatcgtaatttctaaatttccactaatcacataatcaatctcttcgtagctgagttcccaatcaaaacgtgaatgatcaatttccaaaaagcctgcactgattttcgcctcttctttactgatgagttcttgataaaaaatctgcgcttcaggattgcccgtttcaaagggtttcatttccacagtgctaccttttacaacttttaatccactggcatgtttttcacattgaaaggggctcgtttcacccgctaaaatcatttttaatagctgcaacaaggtctcctgattcagttcattaggtaaattgagctcttttgattgcgtttcacaggattcgtttaacggaacatgcagttcttcgattaaatcctgtgcagcgggtgtaatgatcgtgttttgattaacacaaagaggttcacccgcttcatgcgcttttgttacatcctccagacatatcaattccttcattgcacctgatcctctctatacagattcacagccatcatcgataataccgatcaccgccgcatccactggaatcgcatcattttccagcattcttctcgcagcactgccgcaggtaacaatcactcgatcaccaatccctgcaccaatcacatcacaaacgatcatctgctcgccatcacgcgatccaccgatgatttctgcaatcattagcttcaggccattcagttgctctgattttcgtgttgcccaaatattatcgattaatcgtgctgttaccattttcgttccttctcttttcgtttgatttcctcgattgctgcttcaacagatgcggtatcaccaaaaatcgctaacaagatcatattctgcggacaacttccgcgaatatcctccaccgtaacgcccactgccttttctgcaacatcagccgcacagaccatttcaatcaatttcccttgaaccaatcctactgcatcaggtatctccagtgctgctttaggaccagagcctttccgacgatttaagatagctagcgttccttcaccgggagatttaatcattcgacaatccatttgctgtccctcctttatttcaccaaacgttttcttctttctggcaataggttaaacgcataaatcgattactttaagacttttaccctactgccaaagctacaaagcttcatctgtacaactcaacgcgatgcctaacggagtaacaaacatcggattcaatggcttgtacgttttgattttggtttttgcttcaatgattttctcaatccctgttaaacaagccgttccgccaaccaaatacagaccattgatctcaaaaccggcaatttgttcggtaatgatcgttgcgattttttctactactggcttcaaaacagcaatcaactcttgatgattatcttgatttcgtttataaagctccgcttctgaaaaagaaaccttgtatgcacctgccgttacaagtgttaagtgagtaccgccagtcgcctcatccacgacttttacaacttcaccatttttgataatggagatacctgtcgttccgccaccgatatcgacgacggcaccgttttgaatcgctaagacctgattggccgcagtaggttcatccagcacattcgtcaattcaaaaccggctccttgaacaacattcttgatcgcgccgccatctaacgcatctgttcctggaggaattgccgccgctgcataaattagttctgtatccagtttctcttctaattcagccttcagctctttcacgatggtaatcgcgccaatgtagtccacgaccatcccatctcgcacgacatctgcatagcgataagcccctgccactggttgatagttttcatccataacagctaaaacgatacaggctgtcccaagatcgacaccggtataaagtgtacgtgttgaatttttctttggtttgtttatcactgcttcaaattctgcgactaagtggtcacaggcagatatatcgttcatagtcatcacaggcgattcctccaagttttaacattttaaagcttttctagctgttcgatttcttttgcaattaaatagatcaattgctctaaagctgcttgttgtttgagtgtgacacaggtttgaatcgttttcgcatagatgattgcgcgtctcaattttaaagcgatcttacctccaggctgaaaaatctgaacctcgctgatttcagaaagttcaatcggttgatctttttcattttcactgcaaggaagctcttcaagattttgcgttacaattttttttacaagttgagtcaaagcagttattcgttcacagctagctgaacaaacatttctcgcctctaacgctgcttcccacagttcgacttctaataacggaaaaaaagtcttatgcttggacactaaagccagatttttcatcatttcatcggacgatcctccagcagtatccgtttcatcatgcgttacaatcggaatctgatgatccgtcaaaaactgtttcgctccaggagttaaacgctcattttttgttaacaaaaaacgttctattgatttctgtcgattttttaactgtaattcctgctcagtaataaaacgcatcagcactcacctcgacaaattctggcgtaaatacctgccagatccgccaccgtaacctgccgcggattggttaatgtacatttgtccttcaatgctgcttctgccatctctggaattgcagcaataaacgcatcttcattaattcctagatctgttacgaacttcggaatatcgagttttcgggttaatttttggatacctgcaatcaaaagattgaccgtcgttctttctgttgttgagcatattcccaacaagttcgccgcttcagcatacttactcaaagcaggcagatcttgattgctctcaattcccgcattaaagctaataacatgtggcaataatatggcattagctcgaccatgaggaatatgaaaacgtccccccagcgcatgagccaagctgtggcaaattcctaacgaggcttcgctaaaggccattcccgctaaacatgaagcgttatgaactctctctcgccgttgtgcatcttcaccatcagccactgccttagctagatcctgccaaacaatcctcatcgctttttccccacaagcatccgtaaagtctgtggcatttgttgaaacatatgcctctaaggtgtgagtcaaaacatcgataccggtatccgcagtcacactgctaggaaccgttagggtaaaaactggatctaaaattgcaatatcaggaatcatcgcatcatccaccaaagcatatttgccattaacggatggatcggaaataaccgcaaaagatgtgacctcactaccagtaccactcgttgttggtatacagattaattgcacagctgattcgatccctgcctgttgatagatttgtcgaaccgcttttgccgtatctaaggcagaaccaccacctaaagcaataattgtatccggttgaaaatctgccgcataggcaacccctttggttactacttcaatcgtaggatcaggaacgatttcagaaaaaatttgatacgagctgttcgcttccgacaaaatagacgtgaccttatttatcatcccgcttataacaatgaaagggtcacaaataactaaagcccgttggcatcggcaatctttcagataagttgtggcgttgctgccggaatatatttttgttgtcattttaaaactccccattctctcgcccccttcctaaaattatttgttctatttgatgtagctcttctttttccaagtcaagtaccagatcaacctgctcaagtccacaagccagaagttgcgctttggcttgctgcaaggcagactcttcataaaatttgtgataggtgacgattccataaataggaattcgaaaaaccttcgcaaaatttggcggatagctgtggcgttttgcagtaactggctgtaaaaagattccacaagacgccgtttgctgtaaagcaatcacatgcttatgcatccaaggactttccaaatagctgtctggaacaaggattgtccgtcgataatacatgatattggcgactttctttaatggttgcgcgtttgttttttccagataattcgcgattttcagcttgccgctttctcttggtccaaccaaaaggattctcacgttcgagtcacatccactacgctgaagtgcaatacctctttaaaaacccgcagcacttcagtcaagcttgtttcaacactttcgacatctcctgtaataaccaccgaaccagtaaagcgatctagaaatccaatttcaacatctgctactttcgctgctgtatctgctgcgatcattgcagtttcaaaaggagacaaggtcaagataccaatcgctcctgctgcgtcgattcctaatgattgataaacactcgcgatgggtgctgctatgacatgcgccaacgtaatctgttttccaggcacagactcttcaatcactcgctgagctaataattctgacattgttccgcctccttaatgccgcaccactcgtactggaaaatcatactcagcaatccaagactcaatctgatccaaatcagcatcggataagctcggatcgccttctaccggatattccatgcctaattgtccgtatttgttgacacccaatttgtggtaaggcagtaaatcgatccctttaaaattcggcaaatctttgtacggtagcaggaactccacgatttctttgatttcttcatgactgtcattgatcagcttcagcatcggcatcctgatctgaaccttatagccctgtaccaacaattcctttaaattagttaggattttctcattgctgataccggttaattcattgtggcgcacagggtccatgtgcttcatgtcgtatagaaagagatcgatataatcagccatttctagcagtttattcatgtgactatggccgcaggtttcaatcgcagtatttaatccatccgctttgcatgcttttaaaagcgccaacgctgcttcaggctgcgcggtacattccccaccgctaaaggttaccccgccaccagacatttcataaaaggcatcatcttcatgaatcacttccattaattctgagatcgtcataatggaacctgtgatattgagtgctttcatgggacaggcatttacacattcttgacagccattacaggaaatatcgcgtcgcacctgatgtttcccatgttcatcaatgtagtggatacctaaaggacaggcatccacacatgcaccacaattcgtacaaacactttccttaaacatgacttcaaaccgacgcttgatcccttctggattggcgcaccactgacagcgcaatggacatcccttgaagaagacgatagttctgatcccaggaccgtcatacaggctgtatttttgtacattgaaaatcatcgcttgccgttctatccgttcctctttcacatttaccatccattccaagctccagcttattttttaaatttttgtcagcattgttcgtgagataatctcatcctgaacatccttacatagctctacgaagaaagcactgtaaccagctacccgaacaatcaaatcgcggtattgctctggatgtttttgtgcttcaattaaggtattgttgtctaaatagttaaactgcatttctccattacctaaatgacaagccgttttaagcaacgtaatcagactttcttcaccctctggtgtatccaataaaccagacatgatcttaaagttatgcaccatcccgatgttcatgctgtcgttggacattttcgagattgatttgataattgcagtcggtcctttgaaatcggcgccttgcgttgggctgattccatcagatagcggagtccaagctttacgtccattcgcagaagctccagtcatttgtccaaacggtgtattattggaaattgacaaggttccgtgactcaacactgaatacaatgttttatacttacggtgctcagcttcagtaaagttgatcagatctgccgcgatcaaatcggcataatcatcgtcatttccatatttcggcgcgttcaaacaatccgttctcatacgatcattattcgcaaaatcagcttttaatccttcattcaattcctgcaatgtgtattttttctcatcaaagaccagtttcttaattgcggccattgaatcagcataagttgctaggccagaccaaacaacacccggtccaaaattgtacattgcaccaccagaagaaacgtcttttccgttctccatacagccctcgtacatgattgacatcaatggttttggcgctagatcacgatgaacacgttgggaaataacggtagctacatctgtccatttcgtaatgtatttgatttcttccttaaccgctgcctcaaactcttcgtaggtcttgaagcgagacaaatcacccatatctgggcaaacctgcttgccgtaccacagaggaacgccatgattcaagactagttcaatacaaatcggccattgcgtataggcagtagaggtccattgatacaaacgacctgatttttgcggctccacacaacccatcaaacaataatccctcgcatcttcaattgagacaccctttgccagcatcatcttgatgtgtgtatcatcaaaatgacaagcaggaaaacccataccggctctaacaacatccacgatttttttcagatattctcttggtgagtggttgtgaatgcggcaggcaagcgaaggttgatacaccttgacatgacgaacagcatccatcaataaataggtcaattcattggtagcatcgcgcccttgacgagtcaccccgccgacacacatgtttacaaacggctgatagccagcgaagaatttcgaaccgccttcactagtgatccacatcatttcagacatcttaatcaacatacagccagctaattcaaaggcttggaattcattcatccgaccttcttctaggtcagccttaaagtatggatacatgtattgatccacacgtccaattgacatccctgtttggttttcttcaacgactaacaatgattcaattgtccaaacggcttgaatcgcttcccagaaggtatccggtttatgggcagggactttacggttcacttcagagattttcaaaagctcggcctttcgttttggattggtttccttcgccgccagctccgcagcataatccgccatccgacgagcataaatcatgacgccttcagttgtatcaatgattgatttatagaaatagattttttcaatatcctcaggattttcataatctaattcttccagatgcgccttggcttcattctgaatatcgatcatgccttttttcatcaaaatgacatcatacccaggattggaatcgccgccgccatttagtgcgtgatacgaacaatcggaaacgaaagattcaccagataattcccaaacacctgcttcacggtattgatcctcacaatattcatcgacagatttgcctttccagaatgggaaaagctcttcacgcatgatttttttgtcttcatcagaaatgtagaacgggtcctgtggacggctgccgattgtatcgatctcatcctccatccagcgccatgcgatatctggagagaatgcgcctgcacgcggcttgccgttgggtgcgccaacaatcagttcgtgatcttgtatcaccagcggcgctgtttcacagcaataacggaagcattttgcccgcaaaacaatctttggcatgcctggattttccttggcaatttttgtaatcgctcgggcacgataagtagtaattgacggtacttgctctaaatagttgtctttcaatgcctgcaaacgtttcgtaattccattaggaatctctgttccctcatctgagaccagtatttctgttacgacgtcgtcctttttgacctcgtctgaaacagaagcaaacattttcatcaaggcctgtctttcttctgagcttaattcttttgtcgcttcagctaattttgctgaaaattctttgatgtccatctgtttccctcactttactgctcaattattttttgtaaaaatttctcaataagtaattgttcatctgaaactcgcttgttaactcctttactcggctccttaaccgacgtgtagccaatttcacgaacataggttaaatcctttgctgtaatattcttggctttgaacccgcgtcccgttgtcattccacccaaaatcagcgagactggtaaactggaatcgattccaattcccgctaaacttgctcctgcatttacaatcatgcggccaacaggtttcttcaaagcgaattctttgataatacattgattattcgaatggatcgctaacgtatgtccgttacgcttttcctttaacaactgaatacatttatcacaggcatgaatccaatcagactctaaataaaaggttaggatcggacattttagtgctgtggtaaagggattctcgtcaaaaatatacggttgctccgatactaagaccttcgtcttctctgacacagtaaatccagcgattccagcaatcgtttgtgcatcttttccgacgatgctgggatttatttcattgcttaaaaataatttagtcaaaagctgtttttcttccgcaacactcatgaaatgagcaccagcctcgatcatctgctcttttacttcctttgcaatcacactttcagcaataacaaattgctctgctgagggcaataagccattatcaaaagcacgactagaaacaatcgcttgagcagcctggctgacatcggctgttcgctcgacaaaaaccggcactgaaccacagccaccatagataatcggtttaggatacgcccgtaaatcaaaataatccgccattccgatattaatcactaaatcgacagattcttgctctattaatgctttgactccttcgattgtagtattttccatatagctgaaactggattttggcaagccagaattagcctgattaagaatttcgactaatttagccgctgcctcttccgttttattcggcggaatcaaaatcactgtatttcctgcttttaaggcgcttaacgtagcaaatagcgcatttaaaacaatattttctgctggtaaaataactgcaacaacaccaaatggtatcccgattttactcaagggagctccattagtattcaaaacaccgatcacctgctcttgcaacgaatcattaaactgagctaaaaagctttggtatagctgtgtcttatcttgttcattgccttttcccgtaactgatacttcgaaagctgctagctctgacaatagctgttgcacctcagtgatcattcgttgaatcatgcgatcaagtgtttcttggtcatattcccgtagtaaaaaatgtgcatcgcgagcggattcaaccaagatgcgggcttcttggatcgattttagatctttatccacaaactgcatgacttccactcccttatgctggtagtaattgctccaacgaataccgatcaatgatctttcctaaatcaatatgcggacttggtatcacaacagagctgtatacctccgcacccatttcttcaactgccgcaatacctgtttcaacagctgtcttacatgctgcaacatctcctcttacgatgacggaaatgtaaccagaggccacattttcataaccgaccaactcaacgtctgccgctttacacatagcatcagctgcttccaaaataaaaactaatccaaatgtttcgattgccccgatcgcttcgtatctttccattttgtccctcctaaactactggtcaatatcatgaacagaaacaatgtcacctacagcccgaattggcctgggcataacattttgtgcggtcagagtaccgattccttctgctgccttagctcctgcagccacagaagcttcgacagctgcaacatctcctttgatcatgatcgtcaccagtgttgatccaatattttcatacgagatcagctcaacattggccgcctttagcatttcatcacaagcttttaatgctggaaccagtccgactgtctcgaccaatcctagtgcttcttcacctctgtatctcactaacagacctccttagcttttgcgataagcagcatctacatacttagaaacagtttgccgcccatcttccgtgatcatatagcgcatcactaattcactattcttatccaaatcgtaactcgtcatttcacataaaccatttgcttcaagggccaacaaatgatcgagatacattttatcgttgaactgtttttcactgccataatcctttttcaaagcggacatgacttcttttacatctacttcgttatgatcaaacatgtagttcaaaacagccattctggttggtagcgccattctatgcatctccttttctgaataaatctaaaggattcatcgttacaatgatggctcctaatacgattacaattgaaccaataacaattgttggtgtcagggtttgacctaagaacagaacgcagaataatacgccccagaaagcataggtcacgtttagagacatcccgattgcacaacccaccattgagttggctttataccaacaaacaaatgatgccgcagcacttaatccagataaaaccagccacagaatcggaatacctgctgtcaatgttccaccaagcagtttcaatccgccaacaagcggtacaatcaaaatcaagacaactaagccagaaattaactcgcgtaagttcactgcaacatcggtatcaatcattgccccgccgaaacttgaaaagacaccttcaagcccccagcaaactgctgcaatcaatgcacaaataattcctagtgtaaaattcggtgccccctcaggttttgcccagttgatgacgattgctcctgcaacacatagcaacatcccaaaaacaacacgctttgtagggcgttgctttaagaaaatccaagcaaataaagaaccgaatagactacacgttgccgagattggaattgcgtaagctcctgccattgctaaaccgatcaggtaggctccattggccacaggaccacctagaagaaagccaactaccagcatttgtccaggttttgtcttcaatgtccgcgataattccttcaatcgtccatgttttgcgttataaaataataaccagatcccagcaaataaatcgtttaagcccgagctaacaaaaggagctgctaagaaccccgctgcactgactaaaggatcatatccgctagccaccataaccaaagttgaataaatcccataagtcaacccagaaaacaaaccatttccgagtccagcgattcgaaattttttcccaaccgctttcattttcgattctgcagaaaccgttgtttgcatgacactcttttcactattcatactgattccccttactcattcgttgtatgtgggagaatagtttctacttcaccatgcggacgcggaatgacatgcacagataatagttcacccactcgttgagctgctgctgctccagcatcggtagctgcttttactgcaccaacatccccacgtaccattacagtgacgattccaccgccaacgagctcttttccgatcaaggaaacatttgcggctttcaccattgcgtcggctgcttcgattgatcctactagaccctttgtttctaccattcctaatgcatcgtacttcactattgttcctcctattcgcgattgaatcgcatacattttttatgcattttcactgtagattgttcccttacggtaggagtcaaccccaaatttttaaaaatttgtgaagtataacacaattgtattgttataaaacagtttcaattctcaattaactgtattaatcgagaatcttcagaataaaatcttttaatcacttgattctatttaagtaatatctcttttaaattaaaataatttcatagaagtgccgctgctattttctctcagattaatacagaatttaaaaaaattgaacgaaaataaaaagaactatcacatttttttacctcgaaacaagtgaaaattgttagaatgacaaggtaagaaaatttttcaattattgatgatgaaagaataaatgcctttttaacaacgaaaatctttcctttttcaaaccttccccttaaagacaaggatcatttctcttacacatttttcagaataattacattatcattttcatttttgcacaaaaaaaagctaagcgacttaagtggcttagctctatcatgctacaatttcgtagcaggtatcataatttcggtgacaaatttatttgtatcttgtgtagaccaataatctatgacatagcgctcataacaatttggtccaatctcataattatgttctttcgcccatttttccaataacggatacttatcagcactgtctttttgatccccaaaatgatacatgcaaacaaacatttgtccgccaaatgcttgcctcggtaatagtaacttgctgtttcgtacaggcttttgagtgaccgttgcctgattaatcattccttgagcttttgctttataatccgcaaaacccaagatgacaggtccggtaatctcactttctgtagtttccaataagtttgtccattcaatattgatgatggattttttgtaatcgtattcaaaaccctgttctaaaaaataatactgatcgcgatcgatgtacttcaggctgatactggtaatgttattttctatcgccattgtgccttcatttaaaagccctacccaatcagaaaccgattcatgacaattctgaattcgctcctcttcctttttgagctcatcaagcttactaagaaagttcctttggtggtagaaataatccgttgtattcgaaacttttgtcatttcctgtaaacgaaaccctatttgcttataatacttcaaaactggaatcagcataactgtatcttcgctgtaatagcgataaccatttttaggacttacatggtcaggaacaagcaatcctagctcttcataaaagcgtaatgtctttctagaaacatgacaaatctcagccgcttcaccaatactatgcagtttcttcgtatctattctcgtcaccatcatttcacctcccgataattctccaaaaattatgaggtgttctgttatagttgtcaaggtaatttctgacctggtatctaacgagataaccacaaattgtgaaaaaaagtgttaatatcaatggaatttaccttaaacttttttatttatttcttatattaattttgaataaaattagctattcaccaagagacaaccagcttattttgttattttttagcaaagaaggatttctcttcactttcagatgttatctaaaagaaaatctgttattttatttccccttcattgatattctatcttggttttaatcctccaaagtcaaaaattactgcatctaatactaaatataatctagaatttttatcaaattagtgtacgctatatttgcaaataataatctacgagacaccctcacttttctgtttatctccgaccaacatcccgaataagcgaaagctttttcgtgttatactatttaaagtaagcaaacctatcttcccatttttcgcttaaacagcttggcaaacattttggagggaaaatgaactcttataaaggtaaactattatttcttttatcgttatttttcatttcttttatcatctgttttccagtgagagaattgaataatgtaatgcaaaaaaacaacatatccgatcagcagattactgataatcaagcttttttgaataccttttctggcgaatggaaaacggcagacgcggccaataaactaacgttcagtgagcataagcaaattatcacgatttcatttcctactgagaacagaaaagttaacgcaagtgtttcaagtcaacaacctgcaagaaaacgttggcttctgtcacccatgaatagtgaagaaacacaatatagtgtgatcttactttctgacgatgaactcagctttcaaatgtcaacaactaaacccaatgctgaaggtacatcaaagcctgaacatttttatagcataaaataacttaaaaggaaaaccgaaagatcatggctatcaatattaataaccatgacctttcggatttctttgttttttatttgtaagtaaagtcacacatgaacgatgaggtttaattttctaaaatttatccatcggaaaaacaattcccgattgtcttctcatttcagtcagcgtctcatggatagccaagctcacatcaaaaggaacttttgttgattcgatttcattcttcttgatttgattgatcatttcagcaatttcgtaagagaaattctcttttggtgcaatgcctagttctgtgcgtttgccggtttttctttcaatgaaactgattctttgcggctgacttggctgatcaatcaatagctgacccagttctccgcaaatttcacaagtgttgactgtatcactggctttcgaatagttaagagtcacattaaaatcatcgtagcttagaatactggagcctgcaacatctgcacctgtatccagtaatgaagctgtactgagaattttattgggcttgccgaatagtcccacacaatcagcgacgacatatacgcctaaatccatcgtggccccattcgctaactcatttctgaatgttgtagggttttcaccgcttaaatatgcatcgtatctagaggaatacttagaaaaattcaagtttacttggcgaatccttccgactaggttcagattgtcacgcaaaatttgaaaattaggattgtataatgggattaatccttcttgtaaataggtgtgattttttttcgcacaatcaatcagctcttttacttgttcatggttggcagctaaaggtttttcacaaaaagttggaatacctttttctaaaaaataagtcgtgatcgggtgatgcaaactgttagggacagcgatatagactgcctcgatcaactgagattcagacatctcctgataagaattaaaagcatggggaattccatatttttcgccaaaacctttcgctttttctaacgaggttccgcacaccgcgacaacttcacattccgctacttgagcagcgcccgccataaaaaagtctgtcacaaagttcgttccaattacaccaaatttcacgctaaatcctcctttttattccaatcaataataacccctgtatactcatttttcttattcatcaatccgtcatatgcttccatcagattttcttcggtgggagcgatcacatggctgataaaacgatcgacatcaatgatttttttgtttaatagggattcaatatattttaagcttctgtggatagagagtctcgagccttctttttcttgataagggtacctgcgattaaatgccccgatcaccgttaacattttggtatgaatcgcgttaaaggaatttgtaacattcgttgtatagtcggtccgcggagagcccatcaagattacttgtccatatttgcctgcaatcttaatagctgtctcaatactctctgataaaccggtcgcatcaacaacaatatccacacccttcttctcagtaatctccatgactgactcatattgatcatttggcgcacaattaattacatggttaactccaatagattttgccaattctgcacgatcggtaataggttccaaagcaatcacctcaacacccatttgctgataataaatcgatagaatcaagcctaaagttcccatacccaaaatcgcaacagtatctcccaacttgacatctgctggtaaaatcccgttcattgcgatccaacacatcatcagaaaagagccttcgattgagctagtttcctctcgtaacttgaaaagaactcctccatcacttttacttggatcatagaactgcaaactactatgcggtccattaaaaaggactctgtcacctacattaaagcctgctaaatcgtttccaatcgccagaattttcccaactgagcaatatcctggacgaactggataaactgctcccttcttcagtccaaaaactcgtgacaattctgttcccgcactaatcaacgaaacttcactttcgattaggcattccttcgctgaaacagccttcggatcgacagtttcttcaattaaacggacatcctccactccgttaatcacaacattcttagttaaaatgatactcaccctttcaaagttgacatgttgatataccatataaaaagcgtaacacgttgttagaagacagtcaatctgctatgataagcttaacaatgatatgtcaacttaataagttgacttatatctaatactaaaacggatgtaggtggttagatggaaaagacacaaccctttaaatatgccctgatcaaaaatgacattgtacaagcgatcaagacaaaacaactgaatactgatgataagattttatctgaggctaaattgtgcaaaaaatacaatgtcagccgaatcactgtaactagagcgatcaatgaattagtcgctgaagattatctctatcgtatccaaggtaaagggaccttcgtcaaaggaaaacagctatctgaaggtgtatctcaactttcaagctttacaaaaagaatgaaggaaaaaaagctcaagttagaaactagggtactagaaactacaagtgttactatgccagtgaagatggcgaattttttcaatctgccttcagataaaaatgtaattctgttgaagcgattgcgaatcgtcgatggcaaattattgtgtctgagtatcgcttatttaatgcctgaaattttttattggacgacgcttgaggatatggaacacgaatccctctatgatctattagaaaacaaatacgatttcaaattaggtaatgctactcaagagtttgaggttggttatttgaatgaaaagaatgccaagtttctagaaatatccagccaagatccgtgtcttaagctgtcattatacagcacattaagtgacggacgtcccgcccaatttgaagaaacctattacatcggaagcaagtatgcctatcaacttctactaccagcaccccattcatttaataacgttatcaacattgaggagctttaagtaagaaaaaagtgaacgctcgtagactatcaaagcgataggaatacaagcgttcaccttttccctgttatgaaaattttaaaatagttttgcaatcagataatcaaacaatatctggataatctgttagaaatggttttcatgttcagttaattactaatcttctttactgcggcaataatcaacataaccaaacgcaaaggcttcgatcaataggaaaaaggaagaagcggtttgaagccaccaatcggtggggttcggactacggctgctagaagcatatagcgaataatctgctctgccagacaaaagattattttgcatatttgtgatggaaacgatcgtagaatgataggtggaaaggacattcagtacattaaaaaggtgctggttttctccagatagtgataggacaaaaatcaggtcgttttcggtaatgttttccatgattcgtttgaactcattggattgtgaagaggcaggaatcatttgggccggcttgccaatcaacagcaagagtcgttgtagctcagctgcttgattttgttgcgtgactcctgttcccagcaagtagacattacgactattctccaaagcctgatagattttttcccagttattctcttcaagatatcggattgttcgttgggcatctgaaaaaattcttcttttaaaggcagcatcttttccaatatcatttggattgttttgccatttcaaaaaattacgcagctcgctaaatccagtaaagcccagcttttgggtaaagcgaatcacggaggattttgatgaatgacaaaccttcgcaaaatcattggttcccatcgttgtgacttccttgggatgcgcatggatgtatttaaccatttggatatccacttcattaagtgtttcgtaatgttgattgacaatatcagaaaaaagcatcgctagccctccttgtcttttattttaccttacaaaacctactcaagagattcaagctagaaaaaagcattaatgatcatctcactaatgctttattactgaaattattttaattcaggccaccactccccattggcctcgatcatttcatccagaatctgtttcgcaacagaagcggaaggaacggtttttgaaagtgtcatcgcctgccataatttttgatatgatttttcctcaaaggcatccaccactaatttttcgacggctacctgttgttcgatcattcctttttggaaatgcgggatttttcccatacataatggttcatagccgcgcttgctgacaatacatggtacttcgaccattgcatcatcgtctaagttagcgatcgccccttcatttttgacgattagaagcattcgttcataggtgttgtaggccaacgctcccgctaattgtacgataaattccgcatgttctcccgcttcgatcgtggtgtcctcggcggtttgagccgctgcgatacgttcacattctgcaaaaatatttttttcccgattgtccattacttcattggctcgggtataatttgggtcggcatgagccacgacatagtcaggatatagataatacttcaaataggtattcggaaccgtgtttggatccacggcataaacatcctttactttttggaaagtatccatccagctagtttcttctaataaaggatttccttcatcttcagctgctgcgtagccaaattttgccacgtgctcttttaatttcggcattagatcattgccctgcttgtccgtcatttccgtccaccagccgaaatgattcaagccgtaataacgatcgacgatttcactttcactgtctagaccaacaatatctgcgattgattttttgatcgccactggcatatcacaaatattaataatcttcgcgtttggacgcattctccgagttgcttcggctacgattgccgctggatttgaataattcagcatccaagcctcaggcgaatatttttccatataatcaatcaattcaaccactccaggaatcgagcgcataccatacgccattccacctggtccgcaggtttcttgcccaagaaccccatactttaaagggattttttcatcctgctcacgcatcttcaaaccgccgactcgaatatgggccatcacaaaattaatatcggtaaaagcttcttcgggatctgttgtcgccaaaaattcaatttctggcgcgcgctccttaacgatcacttcacaggctttcgcaacaatattttgacgctcctcatcgttatcgtaaaattttaacttgcgtaaaggaaatttatcctgattttcaataagcatcataacgattccggcggtatacgtgcttcctccgccagcaataacaactgactgtttttccaacttcatctttctcttcctttcaaactaaaaacttttaatttttatccttcgctcatccctaatttttcgcaaatatcatccttgaagctttgaacacccattcctatgatgacttggacattcgttccatttaaaacgacccctttttgttgagagattttttccaattgagccgaatctactagctcttcgtctttcacggtcactcgcaatctagtgaagcaattagaaatactttcaatattttcttttccacctaaaccagcaacaactaaatcaaaatcgttcgcactagcagtgacaagctgttctccagttgctgcatctgctacaactatttcttctggatcatcttctctaccaggtgttttgatgtctaatttattgatcaaaagcacaaaaatgaaataccaaatgactgacatgacaattccgacaatgatcaccaaatagaatttcgtgacagaaggactgaagactgagttagaaacgaatgtatcaattaatccatacagcatgtacgttctagccccaatcccccaaagaattgtctctgaaatagcggtcaataagctatgaactagccatagcaatggagaggcaaataggaaagagaagtccaaaggctcggtaatcccagccaccgcggcaacaaacatcgaaggtaaaatcattccctttacttcttccttacgctgctttttcgcgcaatgaatcagtgccaatgaaacagcaatcgaaccgaatattttaacaaagccaaaggttgcaaaacgtaaagatggatccaagctagtaatagatccggcatttgccatttccgcatagaatatattggccgcaccattgtaaacctgtcccccaatttcagcggttccacctaacgcagtgaagcaaaacggcatccacagcagatgatgcaagccagtcggaatcaagaaacgattgccgaacgcataaatgaagactcctaatagtccagtggtcaaaataaatccagataatgacgaaatccaattattcactactggccaaatatagctcataccgatcgcagttattaaaatgaccggaatcaaaatcatgaaggaaaaacgcgaaccaccataaatacttaaaaaatccacaaactccttatcagaaaaacgattatggataaaagcaacaagacagccgactagcatccctaaaaagacattcatgtctactacttgaaaacctaaaaccaccgcttgtcctgttccgaacagccccatttcaccagcttcagctaattgatcagtcaatgtcagccaagcattattggcagccaaaaagaataaaaatgcgattaatgaaataagagcggcctcgacctttttctttttcgctaaggatgctgtaattcccacacagaagatcagtgccaaattatttaacatgccgtccatcatcgttttgatcaatccgccaaaagtctggacgatgctcggcatgaattctaattgtaaaataacagaaaccgccaagaacaaacccattaccgccataaacttaactggaacaatcactgctcgagaaaagtcctgcattgtctgagaaaatttacttttcatcatttctctccattcattttattgagtatacgtatctcttgaccttagactaacaatttttgaaacccgttacaatatttccttgattctttggacctaagtccacaagtaggaaccatgaagaaaaatatttttttaataacacttttctgaacaatttaataattattgtttgtgatttctctccccagcttttaacaacttaaaacctataatagtcatacaaaaaaacacgcaccctcgttcataagagagcatacgtgctttaaaactatttttttaatgaatacattaatcgtcaaaatcgtacaatacagtcgataaatagcgttctccattatctggtacgatggctaaaacttttttgtctgctcctaactctttagccacctgaagagcagaatggatagccgctcctgccgaaatcccaaccaaaatcccttcttttgcggctacctctctagcgctttccaatgctttttcgctggaaacggaaagaatctgatcatagatttctgtatctaatatctccggcacaaaccctgctccaattccttgaattttatgaggagaatgggcgccaccttttaagactgaggattcctctggctcaactgcataaaccttcaatgacgggaatgtccgctttaattcttgccctgcaccagtaattgttccccccgttccaactccagaaacaaaggcatccagaccgctatcagcaaaagcttcttggatttccctagcagtcgtttcacgatgagccgttgaatttgctgcattattgaattgtaatggtaaaaaatacccgtcctgactagctaattcttgcgctttagcgatagcacctttcattccttcagctccgggagtcaaaatcaatgtcgcaccgtaggcttgaattagctttcgacgctcaatgctcatcgtatcaggcatcacaattataacgggatagccttttgctgccccaaccattgctaacccaacgcctgtatttccgctagttggttcaataatcgtatcccctggcttcaaatccccagctttttctgctactacaatcatattcaatgcaatgcgatccttcacgctgccgcccggattaaaaaactcaagcttcagatagacctctgcgctgttttcgggtacaagttgatttaattttacaatgggcgtctcaccgatcgtgtccaaaattgattggtaaatttttgtcatgttgatttcctcctatcagtttttgtttacttctgattaatttaaaacaactatacctgttattcgccgcttttagccaattgacattttttatggatgacgattggttttagttatagtgacttgatttatctttttactggcatagatttcttttaaattacttacataagtgcgctataaaaatccatccatcctatcatctttatgaaaatttcttcattataaaataattgacctgcgcgtaaaagccgtctactctaaaagaaaaaggtattcgttcaatcttcctattaacgaaaatttgtcccattagataaggagaaaagcatgaaaaaaccagtaattttgattgttgaagacgaagaaagtttagtcagctttatcgctgaagaattaaaatatgaaaactatgaggtactgattgccgcagatggtcaagaagcgttgactcttttcgatgtcaatgaagaaagggtcaatttgctgctgctggattggatgctgccaaaggtagatggattgactgttgcacgaaaaattcgtcgacgtagtcaagtccctatcctaatgatgactgccagagatcaagtagtggacaaagtgtcaggcttagatgctggcgtagatgattatctcaccaagccctttgatatcgaagaattgttggcccgcattcgtgtgattcttcgacgagaggagcggatacagtccttacaaaatgagccaatcatcaaccaatatcaggacttgaccatggatgtggtgaaaagaactgtaacacgggatggccagactattatgcttacacagaaggagtttgaccttctttatgaactaatgaaaaagccggaggaggtttttactagagatgagttattaaatgaggtctggggctatgattatattggtcaaaccaatacagtcgacgtttttgttcgagcgctgcgtaacaaattagatgacgaccaacaccctcgcttgatccaaacagtccgaggcgttggttatgtcttgagggctgatgatgaaaaatagaaaagaacaaggaaaaacactgcagtatcaactgattactcgttttagtatgatcatgctgggattagtcttactagtcaatcttctaatcctcagtgtcactgcactgcagttgtatgaatccagtaagaaagaaaccgaagccattaaggatgcgctgtctcaagtagaaacacagaccaatcaggaatggaaaaataccctgcagctttatatcgccgcagatgatcctaggtattttatccgtgtttcgctagaaaaaggcagcacagtatattccagcgatgcctatcagctttatgacagctttcaacagctgagacagctcccctttttatcagatgttctatgggatgaggatacgccctatttgtttcaacaattttatgtaaaaaataccagcgtggcagtactcaccagtatggaagataattttgaaattctagcgactctctttctgtggtctttagaaatatccatgctgatcatactgctaggaatctttttcgtcgctagatttgcaaaaaaaatcagtgctccgctagtaaagatgaatcaagaggtcttgaatttgtctaagcatccgcaaacaaacgaacgattatcaatacctctttcacccaaagaagcagataatcttgcaagctccttcaaccggctgctgcaccagcaggaacagctgatgcagcgagagcggcaatttatctcagatgcttcccatgagttgaagacaccattggctgcaatacgaggtcacgtcaatcttatcaagcgacgcgggaaagagcaccctgaagttttagaaaaatcgttaccctttattgataaggaatctcaacgaatggaattattagccaatcaactgctaattcttgaccgcgagagacagcaaggagaagtgcagcagctatttctagcagcactcatccgtactacgcttgaagaatacacgacactgatgcctcagaaattgaaattagatttagatgaaacagccagcataatcggcaattctgaacaattttatcaaattattcgtaatttagttgaaaatgccattaagtatacaccaaatgaaggagaaattactatctctctcactgcagctgaaaaagaaatcactttaaaaattgccaatacaggagaacgtatccctgatagcgaaaaagaaaaggtttttgaacgcttttatcgcatcgatcgctcccgctctagtaaaattcccggaactgggattggtctggcaatcgtgaagcaattgacggagctttatcatgggagcatcatagtcactgatcatcaaccaagtggcgcgtgctttactttgaagtttcctaactaaaatgaagatttcttcatcaagctttcatcccatcttgaattttcagtaccctcagccagttatactttaagtatagaaaagatataaaaagatgaattgcgaaaggaagaaaacaaatgaaaacaaaaggattacttttactaattactggttctgctctattactacttgctggctgtggagacaattctgctcagcttgaaaacggtactcaacaggagtcgagcagtcagagcgttgcccaagaaagtcaatcaacacaaacgaacagctccactgcttctagctcaacaaaaaacactgattcagcaacgaagcagatgtctctagatgagattatcgctctttaccagaaaaataagccagatacagatatcaccggcattgaaattgagtcacgaatgaataagtttgtctatgaggtaaaaggaatggatgacagtaaggaatacaaacttttcttcacagaaactggcgagcttcaacatcaagaagaagaaatgctggatgaggatgaacggaatggaaacgaacgaaacaatgaaaagcttgatctcaaaaacctattgccattagatcaaatcaacagcatcgccaaaaaggaagtcaacggcgacatcacagaatggtcattggaacgagaattatcaaaaacctactgggatgtaaaaattgttaataatggtcaacaatctgatgtctcaattgatgctcagtcaggaaatgtattggaagtagaaatggacgattaaaaacacaaagctggtctcaactatttgatattgttgggatcagctttttaactatagggaaaggataaaatttttgcatgaataaattgctttacagcttccggctttactaattagatttgatctaagtgatctgcacttatctcttttgcgatatttttattgttttataaacaaaaagtgcgacaggattatttaaaatcaatcccaccacactgctgattccctatttcgagaatcaaaaagtagcacgttgtttccactttaagtttttctctttactcatcatgctctgaatgccatttttcgattgcttcttttcgttccttgaagcgtttctcatttccctgtgtcgttggtaaataatagtgatgcccttccaatgagggtggcatcgtcttcatcgaagttaatttagcttcagtagaatgggcatattggtaatccttaccataatgcagttctctcatcagcttagtaggcgcattgcgaataactaaaggaacaggttcgttcatggtttcgtagacatccttttttgccctttgataggctgcatccaccgcatttgacttgggcgccaaggataaatagatcaccgcttgcgttaagtggacattgcactcgggcaaaccgatgaactggcaggattgaaagactgtattcgctaattctaatgctcgaatatctgctaaaccaatgtcttcactagcaaatcgaaccagtcttctggcgatgaacaatggatcttcgcctgattctaccatccgagccagccaatagatcgctgcatcaacatcactattacgcattaatttgtgcaaagctgagattgtattgtagtgctcttcgccttttttatcataaagaaatgattttcgctcaattaaatctagcagcttgtcttccttcaatgtgaccgtatccgcttttttctctccgtttagaacagccatttccagtgtattcagcgctactctagcatcaccattggcgtatttcgcgatggaatcaagtacctgatcgtccagttcaatttttagttttggaaaaccctttggactatcgattgcctgcttcaacagttgtaaaatatcttcactttccaattgatttaaaacaaataccttactacgcgacagcaatgccgaattaatctcaaaggatggattctctgtagtggcgccaatcagaatgatactgccattttcaacgtaaggtaagaaagcatcctgctgcgctttgttaaagcgatggatttcatccacaaagacgatcgttttcgtaccaaaagtccgattatgctccgcatctttcatgaccgtttttatttctttgattccgctagtgaccgcactgaaattgataaattcagattttgtttgatttgcgatgatacgggccaatgttgtcttgcctactcctggcggtccccaaaaaatcattgacgagacgcgatcattttcaatgatttcccgcaacagcttccctttacctagtaaatgtgtttgtcccacaaaatcgtctagcgtttcaggacgaacgcgtgtcgctaatggttcactcttttctctggacttttcaaaaattgatccttgtctcattcaatcccctcctaaaaacgaacgtttgttctattttaacacttttgagctttttttacaaaattgtctacttactttgaacgacaaaaaaccgtacaaatcctataacagattgtacggtcacgttctaattaatcttaaccaaaaaccaaaaagaatcaatacgaatacatcagctctctaagcttttcctgcgctgcctgatcctcagaaatttgaaaacttttagtcggtgtgtagcttcctaagcttccatcatccgcgtattcgccaaaccctgtgttcgtactcacaggctcaccgtttcctgttttcaattcataaacaacaccattatcgcctaataaatacttactgacaggtttactataatccatttttacagaataatttgccgcaaatgatcctgccataagctcttgcttaccaacgctcccgtcttttgatgtataaaagacgcatccgccgatagcatgaataggaaatgcattttcccctggcacgccattattctgaacttgcacctgaccatctggggtattggcataccaatcaccacgtcctgccgctccatgatcaaaaaaccaataactaaccgccatatttcctattacagcacgtccccccgcccaatcaagaaacgcctgattcattcgtcctttctgagcatcagtaagttgagccttactactagattcagtcgtactgctgctttgcgacgctgatgatacggttgattcagatatttgacttgacgaggtttctggtgctaaagaaacacttctcgatggttctgcttcttctttcttagttgaattgcagcctgacaataaaaatacgacacaaaatcctaacataataaaactaatttttttcatcttaatcccccgaaaaatgaactgatttttttaattttaccactaagtaaagtaaaaagaatgagaaaaaagcaagaaccagtttacaattgagattttcacggtttttattagcgaatagtttaacaagccgattcctttgaaatgatagcggttgctattatgataaatgggaaccaagaaagaaggaaatgatatgacagaaagaatctctttagaaaaatcagccttagaatttagtatcgctaatgaaaaagaaccttatatttatcaattacctatagatgaagcacgtgcacttttagaggaagttcaagattctccagtagaaaaattggacgcagatattcaagatgaaacatgggagctagggaaatatggaacgattaacgttcgaaccgtaaaaccaagagataccactgagaaactgccagtcattctttatattcatggcgctggttgggtattgggcagtgcgcagactcatgacaaattagttcgcgaattagccgtaagaaccaactccattgtttttgttcctgaatatgatcgttctcctgaagcaaaatatcccgtggcgatcgaacaaagctatgccacactgttgaaattagtcgcggatgcagatggaaagtatgacactgatcgcatcacgattgctggtgacagcgtgggcggaaatatggcgacagtccttacgatgttggctaaggatcgccaaggaccaaaaatcaatcagcaattattatattatcctgtaacgaatcacgcatttgatacggactcctataaacaatttgcgactgattatttcttagctaaagaaggaatgaaatggttttggaatcattatttaccagaaggtcaagacgcaacaatcaaaacaatctcaccacttcaggcttctaaagaagagttgaccggactgccagcagctatgattcttaatggcgaagccgatgtgttaagagatgaaggtgaagaatatgctcgccatttgcgggatgccggagtagatgtgacacaagtccgctttcaagggatgatccatgatttcgtaatggtcaattctatggatcaaagccacgcgacaagagctgcaatggatgtctctaccgattggttgaataaacgaaataaatagaatgtgaaaaaggatcggacaaatgttgctgtttgctcgatccttttttatttgaattcattttcgctttatccaacttcatttgatcatttgattactcagttgaatgcttttgacatgagtaccaatgaaaccttcattaattacagttgcttatttcttcatgcctttctagccaatgctaatccgccaattattccagcattatcgcctaatttgggcataacaatgtagctatcaattggtggtatttcaacatatccatttataagctcaacgaatttatcctgaacttttttcttcatgtgttcttgtttcatcacaccaccgccaaaaataattctatctggcgaaagcatcagtgttgtattgtatgcacattgggcaaggtaaaaggcttcaatttgccaaaacgaatcgtcagccagtaaattctgaccttttacacccaatcgtttttcaatcgccggtcccgatgccatcccttctaaacaatcttggtggaagggacagtttcctgaaaaattgtcctttggatgtcgcttgatcaacatatgacccatttccggatgactgaatccctccacgaaagtcccattgagcaaggcaccacctcctatacctgttcccacagtgaaatatgcaacacttgctaaccctttgccagaaccagcaacatattcaccatagcaagccgcattaacatctgttgtccattcaatcggaatattgaaatgttgctttagcgttcctacaaaattgaaattttgccaagcaagttttggtgttgatgtgatatgaccgaaactcgttgatttgcattgaatatcaattggaccaaagcagccgaccccgatgcctgccaattgttccttaaaaggtttaaaaaaatcaatgacctgcttcattgtttcaactggagttgttgtgggaaaactgactctttccaaaatcgttaattcctcagtaccgactgcacagacaaatttagtccctccagcttcaattgccccatatatcatcataggttcctcccttcgaatatgtgaaaaacacttcattaacgcggcaagcgttctcgatcagtgaaatgacgtttagtatttcctgaagcttctgttgaataccagtaagcgacactagcaacatcgtcttgccgctcaaataagcgaacatcatcgttgccgatttgttgtaaagtgaccgataaatcttcggtaaaacagatggggtcttgaagatgccaacgataaagaccatgtcgtggcattgcgtcgtcaccaaaggcatgaacggcattcaattttcccgtttcaaaacgatctcttgtggcatctctatttgattggtaaggataccctaaaaaggctgttgaatagtttttcgcatgtggacgtccgaactcatcgtactcatgaaaggcccacgccccgccaaaataatcttctgaacctgttgaggttacggtcggatactcactatccccatcaatgtagaatttaaactcgccttcgccccaccaataacgttctaggcaggtaagcgcaaggtaagtacccacgtaatagccttggccctttaatcgatcaattaacttataatcctcctgtaatttggtaatgcgttcccgatgccaatttgcgtgaaaatataggctattttcttccaattcgtccaccaaagcgtaatttatcgtataaaaaaatgaggacatatccttcggatgtaaattctcgatcgtaattttagcggatgtttggaaaggcatttcgaaataggaattaaagccccccgtaggattaaccactatcggcaacgagttcacctcgcaacgctctccaaacccattacaaaagaaatcccctaaaggactttcaacagcagggctatccgacccatcccaataaattcttaagattaaatcacgtaaaacaaaactgccaaattctgttcgatcacgaatcgtcatccacatatgacgaattattcccgttccagtaatatccgcaatcacagtttcttcaccagaagtcagcggaattgcgccacgacctttgcggcttggtcctagctcgcttggcaacatcgcagctttacctttctcgcctgttggattttcgggagtgattgctcgactctggatttttttaaattgggtaatattttttagtatactcatctttttctcctttgaatgtgaatcgtttttcccttttctacgtgaagaatttttttcgtatcacttattttcaatggcttttctgacaaatttgaaatactcaactcggattgcgtacattcaatcgaaatgaaggcttgaccgaactttaaatttttccaagaaaacgttaaattatcaacaggatcaatttgcaatactccttttttgaatttcaatccgaaatattgactgatcattgtactgacaaaaaggcccgatgcccagccgcatttgccgcagccaaagtctcgcacgacttctccttgtttagcctctaagcgatacggccaccaccaccatgaaccgtctaaatctgccaaacaaatcagctcctctaatcgggttacgaaggcttgatggttgtgcagatcactcattaaaacagtgataaagccaggaaaagtggcgccggattctaatccccaagtgatgcctttgatttcctcgctataggttggattgaaagaactagcagaaaaggtcatggtgttctgatataaaggatttttattatctaaaaattgataaaaaggcatcaacgtagtgtctgattcttctccatcatgcatcaataaattgattttcccatccacaatcacatcacttaaaaagattaacccttgctcaagaatcggtttttgatagttcttcactgaataggttgttttctcctcatcaccgatcccctccaaaaattgctccccaaaagtaccatctatggtcatttgtttacaaattgattcctttagtttacaggcgatgtttttgtatcgcttgctaagactcagttgttctaggacttcaaaaatttctgcaagtccactacaggccttccaaagacaaagattgctgccggtatgatactttccaagtgcaaaggcgtctgataaccaaacagatggaaaaagcattggttcccctgaccgacgttgagctaatatgtcctcaataattcttgaagcattcagtagaacctgcggataccgctcaaagaattttgtatccccagtatgttcaaaataaagactagccagtaacgcactggataacgaattactcagagaatgattgatacctcctgtaaattttgaaccaggaaacttaacgccatattgatcaaaccatagaaccgttttttgacataactccggttcaaacatggtgaatggcaatgatgcgtaatacatatccttattccaaattcgattagtagcaggatagctgccccaattgctgccgacgacctgtccctgtcgattcataccgaaactagaaaagctttgataaagtgcacgacgatagagatggacaactctatcgtctggcattgacagctgcccaaatagctgagcaaaatagttcaatgtttccttcagccatttttcgatatcagattcctgaaaagtcattacttcttcaaaagcatttgggtccacaaaagcaatggcgaagcttgccacttcctgttgtgcgatcgtgtccttatttcctttttgagaaatcaacacattttgctgatccgaatacttctcttgatacaaaggcacatctttcactgaaacttgaaggctttcgtgtgtttcattcacaatgtaaacctgttgaacaagcatacttaaacgcttattagccagtatgggagcaaaggatactacaatgaccttaaacgtcgaataatgatgaatatatctaggcaaacagtcttgaatcacatcgacttcaatacgatgatccgattctgacaaatggtagacaatcccgtttacttcaacctttaaggataacgaattggtttgagagagctgtttattgacccaaacacctggtttttcctcagttagtaaattttctcgataaaaggtcaacgtttgaatcgtcccgcaaacatcaaggtttgctaatgtcttttgattacttacatcgaaggtcaatccctttacatcaggaatattccgatagtagctgtattcgtttgaagtagtcacatttccgtcgtttaactcagcattaaaaaatgggtgtttgggtgaataaattacttcattaatagtcatcttttccctccttgctaaaaaactgcagcctagtagctgcagcttcctactatgcgattccaagtaatgacaataaaattcccaagacgaccattccaaaaataattttgatgacgccgacttttttatctagtaatttgaaacagcccaatgttaccaataacggtacaattcctttaaaaatactatcgaggatttcttggacattcattagttcttcgcccttcattgaaaagctcaaaacggtattgaatttgaccatactgatcgtcattgcgcctaccatgatcagacccaagatactagcagcttttgtcagaatttcaattaacccgttcgcatacagcttttcaatatatttagagcctaatgaatagcctaaaacgccgccatagtatcgcatcaagtaattaggtatattgaacataactaaaaagataattggtgccaaaatatttccggcattggctaagttgatcgctagtcccgcggtaacgacacgccaaactccccagaacaatgaatcgccaattccagccaatggtcccatcaaactcgtcttgatcgcgttgatactttccacgtcaaaaccagctttttcagaattttccttctccatcgatgccgcaatccccataacaaaggacgcgcaaggaatggtcgtcgaaaaatactgtgaatgacgttccaacgccgcagctcgatcttcttcacttttgtagaaatgattaatgaagggcatcatagaataagcaaaaccaccgccacccatcgtcactgggttcaccgaggcgtacatggtcattgagcgccaaaacatcttccgaaccaattttttctcatctttagaaattccatcagctaatttcattgaaagaaatcctcctcttcttggtcaatcgttgcatttacagcagcatcactttgaactgcatgaacagacatattttttagttgtagatctctttgggctataacaatggcaataatcgttccaactgcggcaattgcaatcaatggtaactcgagatacgccataacaacggccccaaagaaaaaccacacagcaatatttttactccaaagcatccgtaacagcatcgccatcccaactgccggcagcagatttccagcgactgttaatccgttcatgatgacctctggaatattatccaagacgcttttgacaacatctgctccaaataaaacggcaaagaatggaataagagcataaagcgcatagtggacaaaccacataaagaagtgcagattgatgattcctttttgatcaccagattttgcaaatttgaaaaatttagcagccatcggtccacatacaaaagaaaaaatcatattcattaactgtaatcctaatactgctagtggaaagacaatgggaataaccgcatccacgtttcctcccattttgattgcgaacgctgtagccagcccagcagccaaagaaggctccgccgtactagagattccgatattgacgacacccataaagatggcttctagtgacgccccgacaatcaaccccgtctgcaaatcccccatcaaagctcctgctaacggagcaacaacaatcggacgactcagcatggacatcccgaacatttcatgtccagcaactccaataaaaacggccaaagcgactacaaatgcatcatacataatttttctccttcctttttctaaaaatcactcaaaatagaggtagctgaacgtttttccatcgccggtgtaggctgaaaaacggtatctggataaagttcaactaattcttttaagtcttgaatttctgacgtcgttaacatcacttcctttgataaggttttcttatcttccgatggcggtgtcattttcccagcattccccacgttcattaattcgatttccgttgggaaagctttcgcaacttttaccgcatctttgacattagggactaaaaccatcaagcgcatgtccttcgcccgtggatcttttaacaaatgaatcgcgtcatcaactgttttaataatgactttgacattcgatggtgcagccatcttcaacgtcatcttttgaatatcgttggtagccgcctcatcgctagctactactaacccagttaaatttagactctttgtccaagtcatcgctacttgtccatgaattaatcgttcatcaattcgcactgctttaatcatttttcttcctcctaaaaaaaatcttcctcttcatttacttcatgtacctcatcaataatagtcatctttaattcctgctgacatttatttaccagtgtctgaacatcctcatttgttaattcctttgttgccaatacgatttccagcaaaattggcagattgaagcctgacaaaacagttacagcgatctctttctccaaaaaggttttggtaatcttctgattgacacttccaccaaataaatcggtaaaaacaaaaatctgatcctgctcattcacctggtttacaaatactttcaactcctgttcaaaatcacactcatccacataagcattaatcaccgtgatctcttgaacctgccccgttagtaattgagtactactaagaaagcctgaagccaagtgaccgtgagtcgctattagaattttcttcatatggttaattcctttctttctgttcacttttatacaagcaattcctgtgccaacttttataaacgttggttcaatcaatttaattcctactaaataaaagtgtctaacctgaaaaaataagattagacacttttttagacattttatttttgaatatagggtcctaataattcatagagtagcgaaagctcataggcattgactttaaaattatatttcatctccattgattgaaaaatacttctagaaacataatagaattcatcttcatctggtttcaaatcataatttggttcttctgctttttctgtccgagccaagaataaacgttccatcatcaatgctgtatgcatatagagatttagttttacccggccatttaaagtgaaatgatagtaattttcatatttggaaatgactgtttccacctcactcatcacgatcgttgggttcagaaagtttaaacgatctgcgattccttccaatgaaaagaattttaccagctcctgaatcaagcggttaaattctgccggcttcatcctccgcaatctgtttgaatggtgcattcatcgtcatcttcaggccaatatcaagtgcaatggaggtcgtcaaattattcagaagaagtaattctccttttaaatcgttcttgatctgtgtgtagatttgatttaaagagcccatatctacgatcaataccaggctatccgtatttacttgccgtttcacaaaattcctggtcgattcgacaatctccgacacattactttccaccggcatatccagtgcttcaaaaacgtaattgccgcataattgatttactactgcttgaatactgctagccgtactatctccgtgagcaagcaacaagcccttcagctcgatggactcatctacataatcagataaagtcacgacaataagcagtcttagaaagttctcgtccttttctgagagcggtggtaaatgctccaagaactgattacataaataagtcgtccgaggtagatttgcagctaatgtacgatttatcccagttaagtctgtcttatagcttggggaaatgacataggatctgctgataatttctgcaacaggtccactcgtcgttaatccgtacgtttttcctaaaacggatacccaaacttttctaaacatctgaatcatcaaccttctactcatcgataaaaaagactccttatcaacgtgatgcaccaaatgctgtacttcattctttaacgaagaaaaattttcattgaaattaccttcatttatcagctgagtaattttttccaaaatcgaatcataatcaaacggtttgattcgatccgtttttatcttttgatttttctttatcaataaactagtaattggcaggctttctacttcggattccagcatatctaactgaatcaaaatctcatttttcccaatcgttaatggttcttcttgtgttcgactgtaaacatccgcacaactgattttaatgatattcttcagcctaccaatattcccactaaagggatgagataacattaaagacaaggcttctcttgaaacaataatatctttttgtaaaatatccgcttcattttgaaagaatagttgaatcagctctaatcgttctcgaattgggcgatcttcaaaagttggcaacataacactgatttgaatacgtcgatcaaatgtatctaataaataatcttcactcttttccgtcgtggcgaagataaaacgaaccttggcaaaatgccagtttacattttcaccgactggacgatagtttccagtatcaataaatagaaagagcttttcttgattttctttcgatagacgatggacctcatcaagaaaaagatagccgttgttggccgttgccaataatccatcggtatccttttcagcccccgtaaaagcccccttcttgtatccaaacagtgtcgccgaaagcagttcgggattgtccgcataatcggcacaatttaaaatagcaaatggtgcatcttcttcaataatttgctcatggatagcgtattcaaaaatttttgtggctaaaaaactttttccaacacccgtggctccatttattaatacactgagtccgttaggcggatatttgacagcggcaatacatttttgaatgacctctctcagacttccgtcatgaccaaccacagaatgaaaggcttcgtttatttgctccgtattatctacaaccgcatattcatctaaaggcttccacaaaacaggctttcccggtaatttttcgacctttttatcttccactaatctcgtcaaataatggctggcattctgacgagagatacctagattcttcgaaattttctcggcagtgatcgaagacttattcccggttagtcgtatcagctcatcaaaaactcgatctttagcgctctttttcattttctcctccagtttaatgtgtctaaaagcataataaactatcggctacaatgtgtctattctatatttgtgttccaatttttactttgaaacacaaataatcgagcttaaactgctattggttataaaactatagttagattaccaatcttcctctcatacaattaacttctctcaccttcatccaacctacttatgtgaaagaataactgccgattgtttatcttttttacagttactttcgaatataaaaaaaccaccttcaaatactagaaaatctactatttgaaggtagttcagattaacacttattacatacaaatattcacatctccacctgacgaactctttctatgtgcatcgtcaagtacacttcctcctctaatggtggtttcacattatggaccttgttcaaataacgtatcactttttctgcacattgaaaggaggactgatattgatcaaggacaatgcgaatcatttcttcactcatatccatcattttgattcccttcacctggcgaatcaaaaaatattgaagatgggataccaatcgagaaaaatttatcgagttctggtcgattttgatttgaaaatggtattggatgatggaaataatctccgagataattttcgtgacgttcatcgcctgttgtatcgaatcataattgcttccactacttatgaaatgcatagcaattgccgttgattctgtctcgtctagtcccacatcctctgtctcgttgattacaatagcatactccaaaagacaaagctggttgatatctcaatgcctttcacaactaacaattttgtcacacttatcttttcttaagttctattctatataatttagaaaaacaacgaaggagacaccatgaaaaaattcattattccttgtatatttcttttcttgagtattttgttattttcgacttccgccctagtcggttcttacctcgattcaagtggaatgctgattgaaccagcgttcttttgtgttccgttgggctacttaacattaggacttgctttctttactgccttatacagtttcgtcaaacaaagaatattgaagaaatactcggcttgattcgcagtaaatcctctgttgaagaaaagttagttttttcaacaacgaactttcgagtattaaaaaagatggtgatgtagacatcaagcgtctgcatcgccatcctttttttattcgttaccaacaattaatcccaatcgccaaaagaaacatttttcggaattaccttctccatttttttcacctgctggtcatattgtcttttgtaataccgataatcctcttcaatcattttcaatgagttcctttgcttgttaatcgtagcatttttctttaatccttctatttgaaaagctaacgtcaatacatgaagttctaaatcttcgaatgctgcatcatccacaatgaaccacccctttgatttgtttgtaattcacaacaaccttctgattatatagatcaatttcatctcgagtaagcccagtatcttggctaatatcgaccaaacagctgtgagtgtacttttttatcactatccccgagagattaagctgtccctcattaaatagaaaatcaatcctatctcctaccaaatactgcaaattataggcattctcgcgaagctccatcatagaacctggcatcgcatgacttccgttattcaattattttcactctccttggcctatttcacatgtaaaacaacaaaccatattgtgatacttttttgtaaagaagcctgtttactacctattttagctgactatagcctatacactcggatattcttaattaaaatttaatatttatagagggactttcatctttttgttaattaggaaacaaaaaagtacccgaatgccattttgtaatggtaatctaagtacttaacatttgatttatatatattaatcgtgccttattcaaaagttcaatccatattttctttcgaactcatttggacactttttcaaaaaaataaactgctttgatgttcttttatttctccaacaaactcttccgaaattcctcccttagtaaaagcaaatgctcttcagaaaaattctgggtcagcttataaccaacgaagtatggggaaacgataaaacgtggggttagcttaacgatgtactttccttctttctcaaagaaaaatagattatagctttcgcagcgtccatagtgatacgtagttaaaatataattaaccgtcttttgcacgtagtcagccaaacgatgaatcgcctctgtgatctgagaatcaacaataatattgatttctaaaaatcccataattggcctactagaaaaattgataacaacgttgttctcagacagaacagtgattcccttaaaattctccggttcgatttgagcctctccgtcaatttcctttaatccgacgatttgcatgtgcggatgctttaaactaccaccggataatgggccatgattcttataaaaaaggacggatttaaattgtggatcttttttggtttttgtccagcaatcaaaggcgaaagtaaataattgtcgattctcttcgattgtataagttgaaatatccttgttatggtctgcatgttctataatgatcgtttgaaaggtgtcctgcaatgtttgatatttattgagcacccaaagcatgtcttcttctcttctcaagatattctctttttctgcgtactcacagaagggacatcccgtcttttctgatcccaaatgttgcggctttccattggcagccagcggtaaaaaaattaagtctgcttctttcttatgcttcatagctctgtagctcccatctgaaaaaaatcacggtttattacacacacatagtgcccactaaagtctgctaaaacagacttgcttcgtagttttcaaccgattaatccaatcatagcatgatttgggataagaaatgacaacaaattcttcaatcaaataggtcagtagctcagatgaactgctgaaaaaaagtgcccaaaagatccttacagatcccttgaacacctataaattattttttctttttagatcatccgtcgatttgttcgataattttttccgcagtcaagccaaattcttcctgtagaaaggctggcgttcccacctgtccaaaacgttcatcgacaccgatgcgtttcagcgggatagcaaggccgttatctgctaaaacttctgctaccgcactgcctagaccgccagtgatcgagtggttttcaatggtaatgaccattttcttacccgttaatcgctccaataataattccttgtctaacggcttaatcgtaaacatatcgatcacatctgcggtaatacctctttcttcaagatgctctgccacatccaaagcctcagaaactaattgtccagcggcaacgattagatagtctgagccttctttcaacaggttacctttacctaacgtaaagctcgagccttctgcataaacgtcgcgaacgcctttacgattgccccgaacataatgcaccccggtcaattgactaaattctttaatgatccactccatctgaacagcgtcagctgcatcacagatgaccacatcaggtatcgcgcgtaataatgccacgtcctcccaagttgtatgggttccgccgttatgcccagccgcaaatccaggatctgaaccaaaaatattgatcgtatttttagaataggcacctgatagaaaaacttgatccaatacacgtcttgttgcgaatggcccgaaggtatggacgaaaggaatgtatcctgtaagatttaatcctgcggcgacacctaccatattggcttcagcgattccgacattgatgaaacgatcaggattagtcttgattagatccgtccatttgctggcagcgcctaagtcggcatccagagcaatcaccttctcgttgttttccatcgtttctttcagagcatcgaccactgcaacacgaagttcttttccaacttctctagtatttgctaatgtaaacatctagccacactcctttactcgttctcgcaaatcagccaggatactctctgtctgtgccaatgttttctcattgtcaaattttactgagtgattagccgccatttcttcaaaaaaaggtactccttgacctttgacagaatcaagaatgatacaaaccgcatgatctttaatagctttacaatcagtgatcgcctgatcaatggctggtatgtcatctcctttggccttcactgttttaaaaccaaatgcccgcatcttttcctcaatattaaaaggattcaaaatttcttttgttgttccatccaactgctttttattttcatcaatgattacgatgcaattattcagcttgaaatgagccaaatactgaaaggcctcccagcattgtccttcatttaattcgccgtctccaacaattaaataaacgtaactgtctttcttctgcagcttcaatcctgtcgcgattcctgccgcgaccgaggttccttgacctaaagaacctgtcgttgcatccactccaggtgtttttgtccgatctggatgagaaggcagtcttgtgccgccttcattcaaggtcatcagccagtttttctcaaagaaaccaacttctgctaacgcactataccaagcagttcctgcatgtcccttggataaaacaactcgatcacgctcctcccactgaggattctttggatcatagttcaatttttttccgtagagcactgctaataattccacaatggataacgagccgccgatatgtccggccccaaccttcctgatcgcctcgatcgtatcgatgcgaatgttcgtggctaaaacttctaactttttaagcgttacttcttccacactatcttctcccttgaattattcagaaaccgcacgtgattttttccctttggtaacagctgtcaaaacgatcaagattcctaatactgctaaaattccaataatcgcagcgatctgtccaccaaaattggcaagatttcctaagaaaattccggttactccataatctgtgtcagagaaggttgaaccctggaagcctagttcacccataacaggcattaagagaatcggcataaagctgataataacaccatggacaaaagatccgactaccgcgcctcgcagcccgccagtcgcgtttccgtaaacaccggcagttgctccacagaagaaatgcggcacaacccctggaataattaccgtcgttccggttaagaccatgatcactaagctcacaattccaccaacaaagctggttaaaaagccgatcaatacggcattgggggcataagggaaaacgattggacaatccaatgctggaatcgaatttggaactaatttctccgagattcctttaaatgccggaacaatttctgctaagatcaaacgaacacctgccaagataacgaatacccccgccgcaaatgagccagcctgctgcagcgaataaataatatagtttgtgccaccgcttaagttttctgctacaaaagtatttcccgcaaataatgcaacaatcacataaacgactgccattgtaatcgtaatactaactgtggaatcgcgtaagaaggacaaacctttcgggaagttgatatcttcagtcgatttttctttatttcctacaaatttaccgatcagaccgctcagcgcatacccaaaattccctgtatgtcctaaagcaaccgtatcgttcttcgtaatttggcgagtaaatggctgtgcgatagctgggaagatcgtgttggctaagcccaatgccaagccgccaaacaataccaagggaacagttcccataccagtcacgctcaaaatcaccgcgatcatacacgccatgtaaagtgtggcatgtccagttaaataaatgtatttaaaccgagtaatccgcgcgatcaaaatattaaaggccattccgactaacataataagtgctgtgtacgtaccaaatttattaagtgccaaagcaacaatcgcttcattattcggaacaacgccctgcatattgaaggccgcttggaacatttctccgaaaggtgccaatgagccttcaattacacctgctccagctgttactactaagaagcccacaaatgtcttgattccgcctttaacgattgaagccgtatctttcttttgtaagatatttcctaaaatagcaatcagagccactaatagcgctggcgtactggcaatatcaattaatatacttaaaataccgttcattttttaatcctcctactttttctttccttccagacatcgcatcctatagcagtccttgtttcacacattctgcttgaaccttttcttttagctcgtccatatcaatgatgctatttaatacaattacattgcctaaatgctgtgcgctatcagctaaatcaccgccgacaaaaaatgtgtctgctaattctggggctgcactgcccatatcataatgagcaacctctacgccttctactcctaaatctttaagtacagattgaatattcatttctaccataaagcttgaacccaagcctgatccacataccgccgcaaatttcattattcatcttctccttcagtcataatttctaaaatttcttcttttgttgaagcatttagtaaagtatctaatttctctttattcgacaaaattcttgttaagctcgccagcgcctttaagtgcatttcattatcaatggctgctagacaaataaaaatttgaatcggatgcttttcatcatctgaaagcagcacaggcgtatccaccttcagcagtgacattcctaactcattgaccccatcttctggacgtgcgtgaggcagcgccacacctttaccaatatggataaatggtccgtaatccttcactttgttaatcattgcttctatataggtttgattgattttttctttcttctttaacgggtcagcagctgtatcaatcgcctcttcccagcccatcttacggtctgtcaattgaatcatgtcagctgttaataattctgataacatcggtcgaacatcttcccttcttttcatttccttgttcatttttttttgcacaatgttgtagagcttttcttttgtaataccattctttaattcaatatgagggattaaaatatctagaatttcattcaccgatggaatcaacaccttcggaaagagaaaatcttcctgaactcttctcattaatgcgttcttttctagttgtgtcatgattggattgatcacatagagcttcttatctgtcttcactggaacactagagaaaataagatcaaatgcactatccggcccttgatgattgaattgttcaaaggaacttgtttcggaaaaatcaatctgcggaaacaattcctgcagctcagacttcataatcaaagatgaactaataccattagggcaaagaatcagcgcccttaactgggcatttctcttcttttgtcgttgattgctgatttcgccgccaaagagaatcgtgaagtagccaatctcttcgtcaggaatgtccttttgaacgagcttccttaatggaaataacgctaatttggtcaattcaaaaatctcatagtattgcatttttatttcgtcaattaatacattgctcaatctaaaatcaaatttgattcgaaaataagccggaaccaaatgatagaaaagatccaggagcagcttgcgataatttttgaattcaatcgcagaaaggcgttctatttcatgaatgatctcactggagcattccaacaaaaactctagcgaggtatcttgaatttccccttgaagaaccgtcatgaaaataactgtgaagtaataggattccatgctgctgtttttaattttcgaaaaatgcgctaagaactgattgctagccttgtgtgcgatcagtggcgctaaaagcgcttgatcctcttgcgaaaagtcgatctcatagttttccgttcggcaaatcaaataggaaatgaaatacaccatttcttcaaaacgactagggacaaacactagatcaaattcttcaatcgtcattgaaaaatttaagcgaacatctgtatacaggtttggggattttaatgatagaccttcatacaacaaacgattgccattgggactggcggctaaaatacctagcaaataaaaagcggcgccgcggatcgaagcttcagctccattaagaaaaaaaccaatttttctagaatattctagggttactccacgttcagcaagtgctgctcgaagctttttcaaatcctttaaaatcgtatttttactgacgaacaggaagtcttggaagtagtagacagatagttcctcaaattgtgcaaaagtcagcaagaaaatcattgcctgtcgttcttcttcaagaaaaacaacttcctcccgcttttgattaaaaaagagatcaatccaattccgcgtaatcattttagggatttcaatttctgtttctgttattaaaatttctgtttcaaataagtcagacgccacttcattgaccttttcgattgccaaaagcaggtccattttcctcatttttgtcatttcagctgcttgatcaagcaaatatttttcttttgaatctccaataagataacttaaccgataatctatcatatccctacccccacttatactatatatccagatcaaagaaagcgctataattcttcggcacaacctgttttcactttttcccaaacagtgtaccgatgtttttaccctgcgaaaaaagaacataaaacaacgatttgtttttctaagtcaaaagctttccaatacagcctctatactcagttactagacttacacattcttaataaaaaactaagcgggctttttatgtaattgttcccttcgttatttttccgcctttgaacgaaaaaatcatcttgaaataagagttgattccgttcgatcctcttacaaatcattatagcaacattccattctccattgccgattgttcctagatacgactaaatcgagtccgcaaaaaatacaaacacctttttactaatgctctatcagaaacaaagaatcctataaacaatcgttaattatcgctattcgacgcaaaaaaagaatcgagcatctaaaaatgctcgatccttcctttttaactattacataatcgttcccattgctacgttttgatcttcatcattgatgaccgcagcagcaacagctgcttctaaacctttagcgattgtttcaacagataagctcggtgttcctacaggtaaatctatgacttgctcaggcaagtaaggcacatggatgaagcctcctttgagattctttccttctttatctgctaaatacagcaaacgatacatgatatcattgcagacaaatgttccagcggtgtaagaaacgctggatggaattcctgcttctttcacattgctgaccatcgctttgactggaagtgttgcaaaataggctgtttcaccatcttcataaatgacttggttcaatggctgttgttcttcattatctggaatgcgagcctccatcagattgatagcaactttttcaacagaaatatctgaacgtccgcccgcttgcccgacgcaaatgacgatatcaggattttgttcctcaatcgcttttgccagaacttcgccatcctttttaaagactgtggggatttccagcttatggatttttgcaccttcaattgtatcaggtaataattttactgcttcaaacgcaggattaattgctgcgccgccaaagggatcaaaaccggtaattaaaactttcatttacttcaccattcctttttcttctatttaaataaaatcatatagcagatttggaaaaccaaaaagattactgctaagaccgcttggtttttgattacgccaaaacgatccttcatctccagcatcgccactggaacgatgttgaaattggcagccattggtgtacacaaggttccacagtagccacaggttaatgcgaccataccgattaagacaggatcagctccgtaagcaagaacaaacggtgctccaattccgacagtcattactgtaatggcagcaaaagcatttcccatgatcattgtaaacagcatcatgccgatcgcaaagacgataattcctaagttgacatttccttttggaatcacctttgctacaaggtcagaaatcacttcgccaaccccagcagccgtaaagatcgcacctaaacttgctaatagcatcggcagcatactcaacggacctactgttgacaacatacgttccgcatcatccaagaatacttttggcttatttgaatgagaataaaccattaatacaataatcgcaaccaatacgccgactccgacaccaactaatgcccctaattgcgtaaatacggcaaaaataattgcaaaaatccccattgataacgctgggataaaaattttcatcccaatcttatcagccattttcttcgtaacagcctcagtcggtgcactttccttgcctttgctgacctttttgaaaattggcggcaatgtcataataataacgatcacgccattagccattggtggaatccagcgaccaaacatcatgactacacctagtgcacaccagaaaaccgcagtaccgatcggtgttggatttgcttcatctcgggcatttttaatcccggtataaacagcaactgcacccataataatataaataatttcaagtagcttttcagataataaaacatcttgacttagaaaaaatgacatgtatgttcctccctatttatcgttgccgtagtattttttgtataattttcggtcttttaagaagtagtatacgattgctacgatgaccgcaaataacgccactggaatctcaaccttcgctaaatcaagcaagcttgtttcgtaacctaaatccttcaatgtcgcttgaactagcaaggctccaggaccaccaacaaataatacttggaagaaaaaccacgcaatattttccatccctgaggacattcccttaagctcttcgacataatcttcttctggttcttttccttttgcttcaattgaaccaatcaccattggcataatgatcggacggacaaaaccggctaccccgccaaagctaatattgaacgccgcaaagattgaacgcatgataccgtaggccccaataactgcgccagctgatgcattcttgattttcccaattagttttgccgcagactccttcagaccatttcgttccaaagttcctgtaaccagcatgatcaggataaaaatagccatcgaacgatttgaaacaaagcttgttcctaacgtcgttaataagccttcaacacctagaccaccagtgatcgctgtaacgattgccgccactaaaatgatcagaattgaatctagcttcaatgcaaaaccaataataacgatcaaaattcctattaatttaactaattccatgtaaaacttttcctcccttattcatttcaaaatgatgtaaaagtttgaaacaaattttcttattatcaccattggcctacgattctactaatattaacgtatgagtagaacgcgcaattgacatccttatgatgatgcaataatcggacgaagccgagtatagctaatgtttatttcctctgatgtaaacaccgcagaggtttggtaaagcgatgttgactctagcaataaatcaatcgttgccagatcatgcacaacgtgagcttgagcgcacaatcttaaatattctccttgagccgtttcatctgccacttcacttgtgtaggcgactgaagtcaaccacggaaaacgaattgacggatagcgatgcgttgtatctgccgcaaagccaatccaataattgatcatttccttataatactctgctggaaatagcttaggcaaccatttatgtgcataggtttcaaactgctgcgcccactcttcattccactttttcatttctggaacagagccaatcgcctctgcaatcacatcttcgatttttttatttaagacgatgttcgaacgatattcttcatttgtagggacccaaaaatagccatacaataatgaacgtggaagccaaaagcctttatacgaaggcgatgtataaccagaaaacggctgctcccattcatgagtaggcacaccatgattatccaccatgacatctggaacaaatcgttcataaagtcgcgtcattcctagcgcttcggtatgctgtgtttccaaattgaagtattcataatagaattcttttcctactccgttaaaacgagcgacatgaagcttccattcaggtgtctttttttgcagttcgtagtgaatggctgcgccatcgacattttccaagggaacgatcactaaattcaggtgctctgcaacatcctgatacttcggatcggttagcaattccttcaatagtagaaaagctccgttcgtacctgacacttcattcgcgtgatgccgcgcattgattatttctgatggataattggtcaaacgcttggttctcgacaaataaccagaatcggcagcttttggtaataattcgatcgcatatatttctcgccctaaataggatgtcgcgatcttgtagactgaaatctgcggcacgcgttttaactgctgaataatcgacagatattcttcgtaaccaatgacttgctcaggatataaatcaatctgatcaatcgttaaatcctgaactgcctctggcaccttttgagggacgtcaaccataaagcgctgcccctcagcttgaaagattaattgtttgtacaaatgaaaatcataatcttgaccaactaatcctttaccaaagagacttgcgtatgcttctactacctccgcctgcacgccctcgatctgaattgttgcagctaatctctgtgatccataatgaatggactgaaggtaacaattgattttcctgcgttcaggtggatagacgacttgtttgcccttcaccacgatttgaggctctttctttacttgttcaagaagtgtgactttaaattgaggttttcctgcttttttctgaacaatcggtaaaatcaaccccggctcctcaaacatctcaccatgaacgtccaagccataatttttgaaataatctgctcctgcaaaatagagatcctcatgcaacgcatctaaactggacaaaagatcatttcggcttgccaaacgttcatctggctcacttgcagtaatctctaattgcagctgcgcgaaaaatggctgctgtgccttagtcggcttgccatttgtccgttcttcaatccatgaacggcaacttggcagcacctcttcctgatacagtgtccaaattttctcaacgtctgtttcaacgtgctcttctaaaacagtcgtgtcattaattttcactcgcagtcttccagttggcggatgaacctttcccatacctggataagcagttagatacggtctttcagaatagctggcttgataagtccagcgtttctcctccgtctctgttttcactatcagttcataggtcagctcttctgagccggaataagtaacaaacgctatctgatccgccgacagattgaaggccttcatcagattatcttgaatcggataaagctcttgcagataacgaatcggcagatcattccatttttccggatcacgaccatctacattattataagtcggtgtcgcaccagattcctctgtccattccgttacaccttctggtaaaaagggcttaaaagctattgtaacattctcaattttctgacttttcaatttaggtatgatgatgtcattgatccaggaatagccttgcttatgggcgcaaaccagttcaatcttcccgtctgcctgacgagctgtcagttccttgtgaatcctttgttgaagcgtctcacgtacttgccgatcctcactgagcacacctgtaatttctacacgatcgcctgactggattttaagataaacagaagctaatttttctaaaaactcatcaacctcccaggttaaatcaaaggtcttctcgtaggcttcgatcatagaacgatgattgacaaaggttaaatcaggaaatgcctgttcaatttcttcctgtcgttgcgtaatttcaggtgatgcatacaccagcttctcctcagctggcaagctcgcggcataagccaattgaccatcgaggtttttcattgaaaagctatctaccaacttttgaagataactgctccaagactcaaaagcggaaagctttggaaactgttcgcacaaaatcgccgaaaattcctccagctctgtaccagttccttctataataatttgttcaccctgtttgaaaatttgacattcttctgcttctcggaataaaattgctggaccactctcatagctctggctaagcagccaatccgttattgctgtggtctccatgccaaaacgaaaagcaatattgctggccgcagccatcattgaagcactgcacttttcgggtacaatcatcttaactgctagtttatcaggtaaaaaatcatggtttcgatcttgtaaaagcgggcccgtactgaataatttctctaagccggtcactttccgccattcaaaatcaatgaccttctcagcatattgatttgtcgcttgataatcctctggcggtctttcatgcttctgcttttgtacaagctttttcattaattcttgttcagttggcgtagcctcacccgtactcgtactagcaattggaaaagttgaatgttcgcacataaatcctgaaatcaaagctgcttgaatggtctgccgttgttcaagaaaagccaactgtccttctacttttagcacatcatttcctccctactgctgttttttaaacaatgtcccaatctcacgtccagctaaaatatcatataagacatgtggatctctgccattggctagaaccatcgagatattcgccgttaaagccccagtcgctgttttcagcttactacgaatcccgccgcggcttaattttcctaagctgggatcagaggcttcaaataagcgttgatcaattttacttaaatgtcgaatcatttgtgcttcttcgttgattgttggattttccgaatacaggccattcacatcggtcaacatgattaataaatcagcaccaactgcctcagcgatcaatagagataattcatcattgtcttcaaattttgttctgtgttctccttcatcgaccgtcaccgcgtcattttcattcacaattggtaaaattcggcgggccaaaagctcctgaatcgtttgatcaaaagcctgacgattttcaggaactgttaaaatatctctacttaataatagctgtccgattttctgatcatgcttcttgaattcagcttcgtataagccggttaggataccttgaccaaccgccgcagctgcatatttagatacttcacctaattggactgtcccagcaccaacagcccctgacgatactaaaataattttctttcctgatcttattaattgggccaagacactggctaattttgagatagcagattcaattattcctgtttccggtgacactaataaacttgttccaacctttataactatgatatctgccttttttatatcttctctcatcaaatacaccttaactataaaaaacagacgattaaactatataaaacatcaaccgaccattacaattcttttattttgtgctaatcatatcacaaagatatctacatgaaaatattttatttttaatcgcccacttttatctcattcattctgagtttataaaagcggttttttctttgtttttatttgattggtatatcctattacaaaacgaacgttatattataagcttaatataaaatattttttcataaaaatagagcaattaaatatcatctaaatttataataaataatttaataaggtaaattgttcaaattttctattcgaaataatcaaacatccaagtttattttcattcttccaaaaggtaaacacattaaaacatttaaaagagaagaaggaatcttcttttaaggcatctaagaaaacgatcaaataatggaacaacaaaaaaattgctaagcaaaaatttcgttgatccattattaaaatcgattcatgtatcttccgtaaagaaagctctactctaaatcgtcttacattaagctttgatacaactcaataatctcagaaacactagtatcacgaggattcccaggcgtgcaaacatccttgaaggcatcttccgcgattttaggaagatcctctgatttcacacctaactcagaaatagtcgctggaatcccgacgtccttactcaactgatcgatcgcctcacaagccgcggttctagcttcttcaatactcattgtttcaatcgcttctacctgtaatacttcggcgattttccggtatttttctccagtgaaatccttattgaatttcattactgtcggtaaaagtgcggcacaggctacaccatgaggaatattgtaccaagcgctcaacgggtgagccattccatgaaccagtcctaagccaacatttgaaaagcccatcccagcaatgtattgtcctaacgccatttcttcacgagctgactgtttttcgttcactgaatctctcaatgagcgtccaatgatttcgatcgctttaagatgcagcatatcagttaattcccacgcacctttggtaatgaagccttcaatggcatgagtcatggcatccatccccgtcgaagcagccaaatttttcggcatgcccatcatcatgtcactatcaacgaaagcgacaatcggaatatcattcgggtccacacagacaaacttgcgatgattcgtttcatccgtaataacatagttgatcgttacctctgcggctgttcccgaagttgtaggtacggctagaattggcaaggaaggattttttgtcgctgcggttccttctaagcttactacatcggaaaattctggatttgtcataatgatgccgatcgctttggccgtatcgatcggcgatccaccaccgattgcgacaatcgcatctgcatttgaagcttcaacgaaggcgacgccatccttcacgttttgaactgttggattaggaacgatcccatcataaatgtcataagaaaccttcgcttgatccagcatttcagttactttggttgcaactttaaaatcaattaatcctttatctgtaaccacaacgacttttttaaaaccgcgcttttcaatttcaggaacgatgttttcaatcgcacctttgccaaaataagatgtttcattcaagatcattctgtttactgtcatttgttttcctccatctaatgtgtttattttcacaatattacttaacaaattggagggtttcccctccgattcatttagctgtttagataaccttctctaggtgttacaccaaagctgtcggctaataaacgtaagttttcatcgctgatggtttgcttgattccgccttgagcgcacacataagtataaacttctgccgccttttcagccgtttcgatcaaaccaaatacctcatccatgtcttttcctgcaccatagatcccatgctgcggccataaaactaagcgcgtttccttcattttggcagctgtcgcctcgcctatttcggttgttccaggaacaatccacggaagaatggagacgccctctggaaagaccactaagcattccgtacacatttgccataatgtacgagtaaaggctttttcatctaaatcgtgggtaaagctcatggccaataaatgtgtcgcatggttatgcataatgatacgattttcaggatcaacctctagtcgtgccatatgactcataaagtgacttggcagttcgctagtaggaaccgcgtcattttccaatccccataacaactgtaacgtttttccatcctcttttacacggatgactcctaaattttccgctgggttcgcttgaacatttttaaagtacttgccagagccggtcacgataaaatatttccctgctaatgaagtagcatcaaagatcatcggaatttcccgaatgacttcagtcggatttaaaaacggcaatacttcattttcctccaacaaatagctgatatttccgccattgcgctcatcccagcctagtcggtataaattagtggttacctcgatcatttcttgtacatagttcgcgttcaatatgttattctttttcaacacgttttccctactttcttaagcttaaaacatctttttcatagtgcttaacctctgttaaccaatccagaccaaccggtacattgttgatttcgcagaagtaattccaaacatccgcaaatgggaagtccttcagctcctcgatcattgctaggcgagtcgtgtaatcgccagacaattcaatttccttaagcgtatcaatcggttcaagcatcgccttcaacagtgccttttgtgtattacgagtaccaatcacccacgcggctacacgattgatcgtcgcgtcaaagaagtccagaccaatatgtgttttcttaaggagatcgttgcgaaccaattcacgtccaatttcctgtaattcatcgtccatgattaccacatgatcactatcccaacgaactggacggctaacatggagtaaaattccatcactgaacaagcctaatgaagataatttgtttgaaatgacttcggttggatggaaatgacctgcgtctaaacaaatcaatttatcgcgagtcaatccataacccatatagaactcatgggaaccaacagtatatgcctcggcaccaagtccaaataatttactttccactgcatctaatgtgtagctaggatccagcttctctgaaaaaatctcatccaatgctgtcatcaagcgttctctcggtgtatagcgatcgattggattgtctttgtagccatctggtacccagaaattattgacacatatctgaccggtttccttcccgaaatattcagcgatcttacgagaacgcttcccgtgttcgatccaaaattcgcgaacctcagaatccggtgaggccaaagtaaaaccgtctttaaacataggatgtgagaagaaggttggattaaaatctaagcctaagccttgatttttagcccaatcaacccatttttcaaaatgcttaggctcaagttcatttagatcgactttttcatctgtatctaagtaaatcgcatgcagattcaatttatgcttaccaggaattaaggaataagctttttctaagtctgagcgtaattcttccggtgtgcgagcgccccctggataatttcctgtaactgagattccgccagaaagctcatcatcactcaaaaagcctttcacatcatctccctgccaaacgtgcattgagatctttacctcggccaattgctttaataccgcatctgtatcaacgttcactttttcataggccgccttagcagcttgatatttttgagttacttcacccattttctttgctccttttttcaataaattttttatacttttctaatacctcgtgatcacaggcttgtggtaaatgcttgctaaatgtgaaggaatccaagatacattgacgtccagcttcaatcgactcaaattcttttgtagcaaccatctgcatcagaatatttccgattgctgttgcctctcccggtcctgcactgatttcaatttgtgcgacatcggccgtaagctgattaaggaacttattgttggagccgccaccaacgatgtgcagcttactgagcttgccattggttccggtcattttttccagcttctctaattcactggcatagcagagggctaaattgtcataaatacagcgggcgatcacgcctggtgtttcaggaaccgtctgtccggtttttcgacaatattcttgaatagcgacgatcatgttttctggatttaaaaagctctcatgattcacatcaataaattgttgaaagggtgcttcctttgcggccatttcagctagctcaggaaaactatattgatagtcttgctttcgagcgacttcttggatcagccacatgcccataatattttttaaaaagcgaatcgtgttatgagcgccccattcattcgtgtagttttcattaaaggcttctcgactaacgtttgctaccttcgtttcgaatcctaaaagtgaccaagtcccacttgaaatatagccccaatctcgaccctgtcccggtgttccgagaatcgccgaggcggtatcatgactagccactgaaacaaaggtcgcctcaggcaaatcaaaatcaggaaatttctccttcaccagcgaacctagaatggttccagcgtctactaacggcggcagctgatctttacgaattccgactaaatctaagagctcttcatcccacgtatcattggcaggatttagcagctgcatggtcgaagcattcgttttctccattacggcttgattggtaaaaacatacccaaggtaatctggaatcaataataatttatcggttttctctagcagttctctttgttcaaccagcagctggaaaattgtattaaaggcttggatttgtatcccggttttctcatacaacgtttctaagctcattagtttttgaaacttctcaactgcgtttttcgttcggctatctcggtaggcgatcggatcgcctagaagagtgccatccttgtctataagacaataatcaaccgcccaagtatcaatgccgacgtagcaatgttcaatgccgttttgctttattttttctaagccaacgacgatctcctgaatcaaatagttaatatcccaacgttgaaaaccattcagcattctaaacccgtttttgaaacgatgaacttcagttaaggtcagctgtccatcaatcagttcacttttcatcaagcgaccgctagacgccccaatatcaatagcaatatatgtttccatcaccttctcctttcactttattgatagcatttaaaaattgagaattgatgactcaatctcgtattttcaacttatgatgttattctacaaccacatgtaagcttttacattacacgattttgatgtatacttgcattatcttggcgaaaggaaacttacaatgacttattgggaaaaagccaaccattcatggaccgctgattcaactagatttattcttactccaaagcaaaaaagccgcgatttattttattacattcaagaaatcggatatttcaaggcaaataagccgtattttaccgaacgagagaatcttccctcctatttgatgaaatttaccttgtctggtaccggggagctgcattatcaagacgaagtctatactctaaaagcgggggatatttttttcattgattgtaagaactatcagtattacaaaaccatcagcagcgagccctgggagatggattgggttcacttttctggtggaaacactgaaaacttctatcacgaattcatcaaaaatggctcgaatgtgtttcacacgaattccgaaaatacgcgaaataaccagattcacttactcatggagaaattattacagctgcaaaaagaaccaaatgccaaaacagactttgaatcctccgttttagtacatgaattattgaatgagatgattctgcaaaaataccaaatggactttgccgacagcgaaattcctgaatacattctgaatgtaaaaagctatatcgacgagaattatcgccagggcgttacactggaggatttagaaaaacacttccatctaaataaatatcaaatcgtcaaagacttttcgaaattcatggggcagcctccagtggattatcaaataagctgtaaaatttcctatgcgaaggatttgcttcggtattccaatctttcaatcaaggagatctcattagaagccggtctggacaattttgcttactttagccgcctcttcaaaaaaaagaccgggatttctcccagcgaataccgcagaacagatcgagtgattaaagaataagttgacagtcagctaaaagcccgatcattcatccaatgatcgggcttttaacgaatagaactatcttaaaattctagttcaacattttcaattccatagttttgcggttgatactctccataataagcggccaacggagacttgtttagataattattcaatgtactgccaacaatgatctccagctcaatcgtttcagcacgtgattgcttatccaaagggtattctcctgtgagaggatttcctaatatttcatgaccgttgatcttcaccgttaagctgccttccgcatttttaatacaaacttttttaggtgttttatcctctaatctaaaatcagtacgataaatccccactcccgagagatgctcaaaatctgaaagctcattccaatagcttaattcgagtaattgtctttgcttagtattctttttagtttctagtgattctggcgcagcgatttcccagctttctacagttaaggtccatggttggttcttaagtgataacctttgatttgcattttcatcaaacccttccgtcgttcccttttccagaagctcaaacacccgacattccttcgccaacagctggtcatttcttacagcaccgagttcacccgtccataaaaaccattcacgcagacgataggttttaaaaagctgtgaaagtgagagactttcctcaccttgattgtagcaaaccactaatttatgttcttcacctgatcgttgatacgtcaataaattacccgattcattcgcgcactcagatatctcaagaacatccactagctcactcaattccttggagtcttgataaataactgcaaggcctcgattttgccaatcagcgattgcttcttttacttcttttgttagattctctcccttgggaataagcaagctacgatattcggccccttttgtaaacagctgattgttctcaattgttacggattctgagaacaagccctcagtcatcacttgataccggtagcctaatcgcgttaattgttttccaaccttgacttgcttgttttcactggcgttatgtcctgactgatagactaaaacatccaagcagttttttccgtaccgcaagagttcatgcaagcgacctaaatacgttgtataagagtacagctgattccaaacaggctgacgtggcccccatggttcagcgaatcctcgtccgccaagcatcggattgaaggcagaaaaacctggccaccgcgctcctggtgcatacttgaagggaaaaccatgccaataggtttgattgactccagccatataatttttatgaagtgtttcaaataactgtgataaggtcgttgcatagccttgaaaaagataagctcccgcttcatcggatagaatactgttaccaccaaaatcgcgtccggcagctaatagtcgaaaagcatcattgccatcctcaccaaagcccagcgattccccctctacgatatctaattttgcagcggcagcggcagaatcgatcgcccagccataaggctgcgcgcgatagttcaagcctaaagaatttgcccactccttcaaaggaactaaatgatactcctgataaagctgattcagcacgttaaaataatcatgtcggaattctcgaaccttctcttccttttcctgttccacctgaaaactagagctttcaactcctaaacctttatcctgattgattcctaaaacaaagggcaggaatggacgaatatcatacccagctcgttttttaaattcctgcaaaagattcgtagtccaatgccctactgattgcaactccaatgaatcttcaaaaaagcaatcaccaacatctttcaatagtgctaaaaactccgaatcaaaaaagaaatttttctcccagagtgattggatcaatgccgccccctttggagaaaagtgatccactacgtatgcatatgggtccattacatctggtcgattggcacttcccatcgaaaacatattaactcgttgaccagttcctctttcataaatcgcaataatcagactctctggatgcagcgaagtgactgcttctgttagtttcccatcttttacctttgaggtgatttccactaacgaatcaaattgaatttcatcactgattaccgtataggctttctcccacggcacagctggcggcatctctacctccttatgtgcgacatgggcagcaagataaacagcaattaaattattctttatctcatcaccgttgattttcttagccgttgtcagatagtgaggaggacatagctcctcgatcatcgctccttcagcgatactatctgaaaaagaacacgtcccatatactaactccttggccgtgccaaaatcatttggatcagcttcgtttgttgatgcaggccagtggggaccgactgtcaaatcaaccgataaaccatatttttttgcagatttcattgcttgcttcacagaaatacgccaattttcactcgtaaatccatacttctcaggcgttaaaacttgtgcatcctcttcagagatcgcgtcatagacatcagaaatttcaactccgccaaaacctgcttcagcaatctccttcagctcttgatctaattcctctagatgatgcgccacgtatccgcctggccaccagtatcttaatcttggtcgactttcctttgccggctgcttaaatttttctctcatagatttcatcacttcacaccttcttttcctctaaaaaacgcatacttttcttttgaaaattcgagacaatcgccccaactgctactattaaagaaatgacacaaccaatcagcatcgctcctgaggcagttgaaccaatcaacaattgatttaagaagttgatgatggccgggcttaaaaaacctccgatagaatttgcggtagacaagaccgccattcccattggtatcaatatcggatgaaccaagatagttattaaaaaaggtgcctgtgagaaaaacaatgcctgaccagcacctgacagaaaactaccaatgattgccaatggtaaatttcccgcaaatgctaaaataagcaatgagacgccttcgattacaaaggcaaatgcgatcatatgtgacctcactagtttagaaatcttgccgacacaaagtccggtaactaatccgcctaactgcgccaacatcgtcaccattcctgaaatatcacttccacctaaattattctcactaatcaaaagagaaatattgttattaaaggcattattgactaccatgaagcaaaaacccatcaacgccacaatcagaactcgtttattcacactttctctcagcgaatgcttctcatgttgttcctgcttttcttcattgctggtttttggcagacaaatccaggcaataacaaaaaccagtgctgcaaaaacgtaagttaaatacgactgataccaaactctagctcctaaattcccggaaatgaacatcaagaacattgtccctatactaacaaaggaaacctgttttcccattgctccttgacgttcctccacgggaaaataatcagcgatcaatcccggaattacattcgtgataaatccgacgcttaccccaattaatcctgagcaaataattagagtaatcagttgatgatgaaagaaatacggaattagtccaaaaatacaggtagcggcagcaccgattaaggcaatcgtgcgtttagagatcgaaagagcaatcctccctacagcaaatgccgctacgattcctgttaaattggcgacagataagatcatttgaatttgactgattccgttatttgggaacgctccaacaattgcacctaaaactggggacatcagcaaagtagccattgaaagcatacttaaagaaaaaatccctactttaattcttaaactcgtttgcattttaaactctcctttatgtggtatttgaacttgtaaagtaatcttaaacgctaaagaaaacggatacaatgcgtgaaacgagctattaactgtgataatatgacctaaaggagcgatctatatgaaaaacgagccgtattttcgtcacgtcgaacacattccgagaattgaccaaacgaagaattccttaagtccctatgttattgttgacccagcatttgatccctatcgtgaacttcatgacaaaaaagaaataagcctaccgctaaaaaatattctttcaaaccttgagctagatgaccaattgcactttgccattgtctctcattacttggatcttccgtccaatttgcattatcacgattatattgagattgtctatttacccgagggcaaactactgaatgtagttaatcacaccccattcattatggaatccggtagtctttttttgatcaatcaggaaatccctcatctagttgcttgtttacctaatgaaaaactgaaaccgatggtggtaaatctgttgattcatccccaaatttttgatgccttccaaaagacaacgcggcagccagctacgttgactagtcagctgttcaactttggtgattaccttatttatcatcgctcggatttagagaatgttcattactatttacaacggttgatcaccgaatattatcaagcgaactatactttttcttatactgtgctagggtatctgatgatttttttagaagaactagttaaattacaacatccattgaataaaacgacagatagacttactcaagacgttcttgacagaattaaaaaggaccccgcaactgtttcgctagaacttttaacaaaagaactttcttatagtaaagggtatctttcacgacacataaaaaaacaaacgggcaaaactatttcacagcttattaccgatgaaaaattaatacttgcggaaaaatatctctcagaaacctcaaaaaccatctctgagatttcagagatggtgaattatcaaagtgaaagccatttttaccgcctgtttaaaaaaagattccagctgacacctaaacaatatcggcttttgataaaatagctgttcgtagtttttatttaagaaggggctagagctgtttaattgagcttaaaccctttaaatcgattttagttgcaatacccagtgctccatcgtctttctgttagagcttgttaattctcttccttgaagccattttacctgttcattagtagcttctttcagagcttgatcactagatccaaatccgctgccgcctgacgtacagaagggaatgattgttttccccttccaatcatactgccggaaaaaagcttctacgattttaggagccttaccccaccagattggataaccaacaaagatcacttcataattggctagatcaagtgcattttcagcaagttctagcttattcgaggaacccgtcatctccagactgctgcgactattggggttgttccaatctagatcagcactagtgtacggttgcttcggttcaatctcaaggatatccgcaccgacaatttcagccagctgagtggctgtccgtcgcgttgttccacttgccgaaaagaaggcaactaactgtttttgtgtcatttttttcgctcctttagttaagtttttattccaattacaatttaccgccaaatactgggaaaaagctatgttctccgtaatcatcaattttttcaatggccttcagcgtttccatatctgcatcgctgatttcaaaattcaactctgcattgtttttcatatgatccggattgcttgttttcggaatcacgacaattcctaattgcaaagcgtatttcaagctaagctgtgccacgctgacatcgtacttcgctgcgatagcttttacgtcttcgcgatttaaaactgctccgtgaccaataggtgaataagcttcaacttggatgccattcgtctgacaaaactcgatcagttctagcggtgtatttccaatatgacacaacacttgattcaccattggcttgatctctgtattttccaataggttctctaaatcttctcttaaaaagttagaaacaccaattgctcttacttttcccgctttataagcagcttctaacgctttccatgcttggatatttccttcaaagtagcgatcatctgactgattcacttccttccatgattgcgggctgtgaataatcattagatcgaaataatccaaaccggctttacgaagagaatcatcaatggatgcagccgcaccttcgtaagtcttttcctcagccgcaaccttggttgtaataaaaagctcctgacggtcgactccactttttctaaccccttcaccaacacccttttcattcccataagcttgagcagtatcaatatgacgatagcctaaagcaatcgcatcaatcaccgcttgttctgtctgctcatcattcagtaaccaagttcctaaacctaaagctgggatttttaccccgttgtttagttcaaaattatttgtgtaagtcatctaaaaaccctccaaaattgattgtcatttttttgttcaatctcatcataatcctaaagccaactttaggttcaagccctaaggagaaaaaatgtttcgaagacaatagaaaaattcaataagtcgcaagataaagctgcctcatactccttcaaaagcttaactagacgcacttataacttttaaaagttttttattagcaccttcaaaaaagcattctattctacattagatcagactttaaaaaactatacaacaaagggagctatcacttaagagagctccctttggaatggcaacactttttttgacaaaaattataaggtgttgtgaatgctgcggtgttatggctccgattgcccttgacaatgagcatcctcggatctgattttctccggcagaagcacaatcattcaattacgctgccttgtatattagagttagggttttaaccttccggttttgattggataaccctatgaaccatcgttattttaatttggtattaactcatttcttttgagataatatatttattggattgagaggctaagccgttccccccttgggtcattgaacccgcactcgagagactggctcctctctctgataagtggattgcgtatgagttagatgttgaaagtccttactttactccgtatctcgtacaaggtagtgacgcttttcagttgagtggatttcaatccaaaattctttttttgaaaggtcagatatacatgtactttttaggcattgatatcggtaaacgcactcacgttgcttctatcatgaacgaggaaggaaaggtattactaaaaggtttttcatttcctaacaccactgaaggagcagagtcattaattgagcgaatggtcgactattccggagcacccagtgactttgttatagggatggaagccacggggcactattggctgtccatcttttcataccttcacgaatcagattatttgattcacgttgtgaatccccttcaaacagacggatggcgtaaaggtacagaaatacggaaacgaaaaaacgatattattgattctgttttgattgctgacttaatgcgctatggctcatttgtcgaaacggtcttatccgatgaaaatgttttttctttgaaacaactttctcgttaccgaacttatttagtaggtacagcgagcgacttcaaaagaaaaattatagccgtattggatcaagtctttccagaatacgcgacgatttttaccaagcagggcgttttcggaaaagcttctaaagagttattgctggcgtttagtgccccgatcgacttagaaaacatttcctcagaaactttggcccaatacttagctgagttaagcaggaaccgaatcaaggcagaaaaagcggaccaattgaagcaagcagcttctaactcctttggagtaaaatttgctcaagaagcgttcaccttccaactacgttcaatgattgaacaattaaaattcattgaaagccaaataaaggaaacggaaagagaaatcaagcacataatggacactttaaattctgttattctcacaattcctggaattggtcctataaacggtgcgactattcttggtgagatcggagatattcaaaaattttctaacccgaaaaaactcgttgcttacgctgggatagacgcttccgtgacacaatcagggcaatatgaggcaacgcataatgttatgagtaaacgagggtctccatatttgcgaaaagccttgttttcggcggctttagtagcttctcaatgtgatcctgtttttagtgcgttttaccagaaaaaagtttccgaaggaaaacatcatctaactgccttaggtgcggtttctcgtaagctttgttacgtgattcatgctattttgactaaaaacgagccttatataattgtttctgattagctattgaacattcaaaaaaactaatggtaagaagcttatttgttgtacccttttttcggaattatctgttataaaatattttttgatttggctaatttttacttgactctatatagttagtctctccaataaaaaaagctaccttcaattagcagctaaaggtagaagagcagaagatcctactctcctgctcgaatagtttttaattctgcaagaaccggaggtttttcttgttcaggttcttgtttctgttcgtcgatctccaggtctaaactactgaaggttgatttaatattttccattaatttactagaaagctctgactggcgtttttttagttcaaccattcgttcatcaaaaatttgcttcaattcttttgtttgtcgattatactcagcccgaatttctgcagccgcttttcgtttgaatttatcttcaatcatttttgatttagctacgatctgattttcatactcctggttaatttttttcaactcagctatatgacgtttttcctctttttcgatcgcgacggcctgtttctcatagagttccatttctgaacgactaagaagtgcttctttttcttctttgatttttaacattacttcagtttcaatcaattctcgttgatcaaccgcgattatttcagtctctatcttctgtttttcttgttcgataaacagatcaattcgatcttgaaaactcaaatcactttcttgttcaactgtttcaaaagaaagacgctttttggtagttccagcctttggagtaccaattgaaagagaatttagttgatcctgtttttctgatttggattgattctctttttttgttggagtagccattagctcaggtgcaatagctgaagcagatacctttctttcttcctcaagctgccgcttcaatttttgaatctcttcttgttgtgctttttgcgctgtaatcaattcttggatctcaatccctgtcggctgattcgtattagctccttgattatcaggcgcaggcattggcggaacagctgcgtaattttgagcaatttgttcttgctgtgttggtactggtgccgtcgttacttcaggaattttaggcactggaatactttgattaactggttcagatgaatcgtctaaaatgctttgatcaaacttaataggttttctagtataaaacttgtctaataaagaatcgaaatctgtttctgaatccattggaaattcaagtgattgtgcgtataagatattccccttcttatcacgtttcacaacgacaacagaagcgtcgctttcttcatcaatgatccgagcgttttcttcttctacccaacaaattaaatgatccgcagctttgatttcttctgtttcaatgttttgttcctggataaactcaaaagtgtatttcttcttcataattgatagtggactaaatttcatcagtatcgcctcctagatctgattgattaatttctacaacagcaacattttccttattactttttggttcttccgttgatttacttcccaacatagccatgagatccttcatatccatctgattatcaacaagcaattgagagacaatatccatttctgctcgttctagggctgctgttttagtttcgactaattctgcttgtttagcatacgcagcctttgccttattcaattccttttcaatgcgatctctctttttttgaagatcctcaatttttaccatagattaatctccctcaacattagattcttgtgtctcagaatcaaccgttgagtcggttttttctgtagactcactaatttttgttttatttgtctcttcagaagaagtatcagtatttgaaccttctacctcttggttactatcaattgtcttactatcttcagtttcattttcttcttcatcttcataagtgttgtttctaggtgtttcacctgttgtcgttaagaagatcttgttaatgttgttaaccttaaaacgcttattttcctcagtaaatgtaagcttcaatgtttgagtttcgggtgtatccactaatgcaccttcagtcgttcctttttcaactagttgcgtgttgtggaatttcacttccacaagagcaacaagtttttcactatcgatgtaaatatccgcttcgtcaaagacttgattgatcacatatcctttatatgcttggttaattggcagctcttcgatctctgtttcttgcgtgtacattgagctggtcatgaacggtttgtatctcttcatgttctcagagagatccttcttggtgtagtaagcaattaagaagttttcaacatccttagaagaaagctctttcttctttgttttttcttcgattgtcttttttacagtatctgcttgtcttggctcattcttcacttcttgtttattgataagttgaccaacaccaaaaccagttagtatcccggcaacgaacaaaaccataatcgctaatcttcgaataagctttactcttttttctttatacattgactatttcctttcttatctgtttattcctagaactttcgccggatctaataagctactcactgaaagatccgttgatttagaaatttataacgataggtaaaattttgatattatctccatcttttcccccgttccacaccgtgcatgcgactttcaccgcacacggcgttccatctaaaagctactcattttattggttcaagatgacacttagttcgaagtatatttattttgtctagttgtttatctgttaattgaagctctattaggtacttcaacgaattgttgatagtatttgcatgaattattttatggacagctttgtgaattatttttaaattatcatacctatcagttcctcccattgagactggggtgatatggtgacaatgaaattcttctgatgataaaacgcgccctgttacttcacatttcccattgaccatgacatacctcgataatcgattgtccatgtattctactgtccggcctgtttctctacgacgtagaattttagccatttcaatttttatatctattcctatccctttataatatttattacgtcctgaggacgtatagggaactgttccaggaataaagttaattggtattttaaattgaacatcggcgattggataaatccatgtcccattaattctccatgtcctataagttttgctatacaatttgtcaaaggtaaggcttgttccatgataaggtttactatatttacctactgttttaaaccttgttttcatcatttgttttaattcataatctatttcactgaatgccactgaaacagttgtcgcaattctataataattgtgcattcccaatattttataattcaacagatgaacataaccaggatttccctgaattcgtttaatggtttctcttagctgtttaatcattgtttgcttacttgtcctactcacatagcttcttgcagtgtatttattacctttaggaactgctcttatctcaaatcctaagaactctgttcgtttctttctcaagttagttattcctgatttttcaggtgatatttccaactttaagtgtttttcaatataacctctaatcgctgtataccatcgtttagccattgaataggaacgagttaataatttgaaatcatcggcatatctaactaaataaccttcttttaaagtggttcctttcagtgcccgatgtagttttccacgagaatatcggtgttttgaggggaaattttcccattgagaagctatccattggtctaagtcattcaatacgatattagctagtaatggggacaatacaccaccttgcggtgttccttttactggagtaccttccccgactatttcagctcttagtattttgctaataatcgctattaacttagtatcacggattcccatattccaaatctgatgtctcaataaattatgatttacattatcgaaaaatccttttatatcaacatctacaacataatgaagttgaacgttatttatgactgagtgcattcttcccatggcttgttcgacactcctcaaaggtctgaaaccatagctgtgcttaaagaattttgcttcaacaatcggctcgattacttgtttaatcgtttgttgtataattctgtcatataaattaggaatacctaatggacgttttttcccgttcttttttggaatgtaaactcttctaactggtccaggtcgataattggacaagttagctcgtataatctctacaaaatcattctcattcaatctttcaatatcggatatcgtgataccatctacaccaggtgtttttgaacctgagtttcgtttaatatttcgataggcaagtagaatgttttgctttaaaacaatgaattgatatagctctctaaatgtttctccatttaaacttgattcatatagctgatcaaacaaatctgtcagaccataatactctgtacttctttctaatgtgctcaagtaggcatacctccttgctttggtatctccttgtcatactcgaaacttgagctttatcttgttaacctttttctaataatagtttctagacttgggactatccctccacgttgattagacgcttcattggtactgtgtccctactttcacagaaataaatgatgttaccatcaacctttccagtaaatagctgtttgaataaaagttttctgcttaccacgttcctattcttctagctttaatcagcaatacttaggtggctagctataaacctataaatttataatctcttcgctgattattccgttattcctaacctagattcgtactaaacggtaatttatcacacttagtcgtgtgccagagcctttcggtctctgtcctgctttagatttgtacattcgctgcttcgtcagacttcgaataagtcattctcaccatatattgcttatagcctcccggcctatagattgcgtattctgcctccagaacatgttcctcagcttaacctgttagggcaactctcagccgactttacctgacttcacacaagttcaaactattattattccttgcatgcaggagctttagaggaaaggtttcagccagcatgatggcgtcattccccttctcgaagaataagttctcccttcctactggaaggtgtctggtttcgttatacacttatccagaaacgtgtcgtacctaaatgcagatgggcgccaaaactatttccggtatttcctaccaagccgacaatatcaccctgctttagcttgtctccaacttttactttgagcgctgaacagtgagcgtataagcttgtttgtccgttatcatgttttattcgtacatgattcccccatgaataatgaaactccgcagtaataaccgttccgccatcaatcgctttaattggagtcccttgtgggtgtgcaaagtcgattccccggtgataatctcccattgaccgccagccaaaccatgagctaatatttggtggatttagcggtagaatatatttccctgtgctaccaccaggatctttatctggattcgctttaaaataggcataccatttttcagctgctgcaacacgctcggccagtttatctccaggattaccttcccaacgaactaaaaagtaacgcgttaattcagcgacaccatttccagcagatccatccattgtacttttaaagattgtccggtatgctggcacgtctccattcaacatgaaatcaagctgtaatcccaaggagtaccatttctttttcttttctttcgcaaagttaaccagcagcgtgtgtcgagttcccccatctgctgtatctgtccactggccaagccctagcccccggtgaacgatattcggataacgtccatagatctgcataccaccaatcgcaagccaaacaggatcatcccaactaattggagtcgcaccaactggaggcggcaaataatcaccttcagctcgtttaggattaatccctgattcaacagaaaaatttcctaacatagctgcaataccttccagcttgtatcccatttccgttaattttgagtaaagaaaacgagcattttctagctctccaccttcaggatcaaacgactcagtaatggttgttttttgacgataagttactttttcaaaataaaacgctggattcactcgctgcattattttcttgtcttcattgtatttttcatatgaaattatcagcgttgaaccagtcgctttacctatcaattcgccttcttttacttctgttccgctctcttgccgtttagaattaactccagtaagaattaaacgagatccgttttgttcatcttcagttatgactactttattctgatcctcatgccactttacttttccacccattggagcattgatatctagatcctggcttgcttcaacttcgatactcgaaaacttctctactttacttccattgacttcaaatccaaaccgtctacttatcggtaaattttcagttttatagggaaactccagttgtccatcaagagtcgaatagccaaactcttcggcattttctttcatttcttcaaaatcatctgaatccatatgaaatttagagtttttatctttggccaaatcatacattgaagtaaatttgtattcgtcttttgatgtatcattcatagcttcccaaacaccatttaaataatcgccgtaggttttgaatgataaaattgaggttcgatcatttattgcataatcttcatggttatagttcatatagaacataacctcgtctagtggtgtataaaatgaataggtttcatcggatcgatcagcatctacttttgttaaatgagtccaggaatccgtcaaatcaaattcgtcttgttgaataggcaacggcgtgaacaacggaataaacataaatattgttgcaataaacatcaacaatccgcctaggatcactaagttttttgtcttcagcggattgttgatcactttaataaccgaactcatgaagctggaaattcctctagctgctttacctaagttactggccttcaatctgttctggaaattccgaaatttctttgctgctttgcgcatcttagaatactcttcaggggttccttggaagcctctaccacgaatatagttgtatgatttattcgtaagtccgtaggctcccttagtcagcttcagattcatacggtttgcgttactaacaacatactttgttgtctgataagtgttcgtacgtcggcggctatcctgtctaattttgacggcttcagctagtgtgctctcctggccaagtgcttcttccccttttcgttttgcaactgaagagacttgccttttgatctgttttgaagttcttgttggatctgctttctttgtttttttataaacatctctcttagccttcagattgtcttttaccgcgtctcttgcttctgctgctctatccgtctcttcttccagtttagcccttgagaacgtctctgagcgcacctgttgactatcttcggaacctagttctttcaaatcagcagcttgtaatgatttctttaattgattatgcttttcaacttgtgatctgtagtatctttgtgcctctctgtattctccccttgtatgtttcacttgctttcgtgaagaaagataggcgttttctttcatagactgtttgacgataaactttcgctgtttacgattttttatcagatcttctggagaaaattttcctttattttgcttttgttttgcttcattcgattgatatatattactttttgaaactgattgaattttaactttttgttgtgtactttttttcataggcgcggcctctacgctgcgtccgtattcatcaactcaaacagctttgtatcttcaggaatatgattctcaaaaggaacaatattcccaccggcatagatcaagccagttccttttggtaccctttcaccagcatatttttgtagagaaaccggaatttttatcactcgtttcagatgatccatatcaactagtttttgtcgcaataacacgataaattcactgtttgagatcatcttctgtccagccgatttttctaacaaggtaccaacattttgagtaataccagtcgtaacagcaccatatttccggatacgtgaccacaatttgaagaaccatgaagcattttgttccgtatcaaaattcaattgcaattcatcgaaatacaagtgaatggttaatttattttggtaagaaacgacttgtttccaaacttggtccaaaataactttcattgcaaaagccttcaaacgatcatccaagtgcttaatgttgaagatgataaaaggagctgtaagatcaatattcgtttcatgtgcaaagatatcttgtgatccaatagtgtaaggttctactttgattactaattgctgtgcaaatgattcaggctgctcttttaagacctcgtaccagtccactagtgtaggttgacggtcaatgttttcaaaacgctgatacgttaaacgagtgacccgatcgaccatacttgcctcttcatctgagaaattctttaagatcgattcaaacaagctaacaagtaagttggctttttccttcactagatccactttgcggtcttcagcatctagcatagaagaatcagccatatctaatatatttaaatggtgattggttcctgaagagatatccaggatctcagcgccaaatactttccctattggggaatactcgtcttccgggtcaacaatgatacaatgttctttcttagcaccatcagcgacaatccgtttaatagttgttagaagatcatagatcaacccccactttgcggtcatacctttaccagatccggacgttccgaaaatcaatccactaggagtattgagatccctttttcgatcgatcgtaatgatattattacttaattgattttgcccataatatttaccagttggagactggagctctgtatttgtaaatggaatttgagtagcgatattactagttgtcatatcacgcatatagttcttttggacatctaaataaggctttccgatcggcaaaatcgtatttaatgcctcttcttgcatctgaaaaacatcgtcaaattcaactcccaaagcttgagcctgttcctttacatcttttacagctagattcaatttttctttggtttcttcaatcaacatgaccgtaaaaacgccagaaaacatacgttgaccgttttgtctcatttcttcagccagttcttttgtagttttatccacttcacttgccaatccagacaccatatcttctgaaagtccgtctttaaaattctttttctgttggtggactatatcagttttgttctgcatatgcttcgtgttaaggtctttttttgctttaacaatgtcatacggcttcgcatgaattgagattgctaattcatgaccagtttcacagatttcatttattaaacgatcttctaaattttctggataatcacgaatgtacataacctttccatacttatcatcaattttgaaagattcgtcgtaaaacttgatccttcctggagcaacaaacgctttacttgttaagccagacaaagcgatatccctgtaggtagtagaaaaatgtttcccaggccgcagcaagcttgacataactttcatgcgcttcactccactacaagaattaaaatccagataattatccgactcttcaaatcgctttttaaaattcttacccatcgtgtctaactgacgatccgcttgttttggtgtttttgcatgggtactaaaaatcgcaaatcgttttctttcaaagctcttttgatcattcataaaacgatcagtaataatatcgttaatttctgaccgataaatatcatatgaatcgccttgagggggtaataaaatattttctaacatgctggatttcactcgtttatttagcaccaacatctgataacgagattgtttatccaatgtattcaaggcttctgcatagttgacaacaacgtttaatttatcttcctcactggccacctcataatccaaattaccaagttcaaacattttcgaatattcattatcgacaatgtgcattagtcctgattcaaaattactcgtatacttcagtgtattttgtgtagttgctgcattttgaaccaatcgtttcttcttatttttttgtgattttgtcagtttccgagacatctttcttttgaacaaattcatctgctatatacctccgtatctgtcctgtttcatagtgtcgatcctgttttttgaggaaaaactctattttgttggaatactctttccattttccaagacctttaagtaaaggcggaacaataaaaatagatcctgtcactaaggacaagatccaaaaagcgattccttccatatccaagaaaataatatatgccagaattgccaatgttcctggtatcatttttataatcatgactcgctgccgtttggtaaatcctaggcgatcgacaggttcaaatttcgatagatctttgtaaaacttagattgtattgccactattagccccccatccattctttcgctttccgttgagatccaatcaagactaaaataaatactccagattttagtaaactcacaaacatagttgaaagattttttaaccaattcccacttgcagcgatactgaacatatcattagccattaacgccggatacagtttcagaatcagaatgattaaacaaccttgaagagcaacggccatgaattttttaataaaaccggttgcaactggccgccattcatcactcacataagcagctaccaatattttggcgaatgccttgaaaagaaacagttcaaacgcccgaaggaaaacgagtattttagcgagaatttcagcgaaccaattgaagaaatgagcgatcgcatttaatccattcaagatcatcttttgagttgtctttaatttcccactaatttctggaacaacaaatttcaattcggttttatctgttgtgaccttattaattatgtttccgatcgcattcgcaagccgtacaatagagtcaaaaatttcgtcactgtagataaccaaaataaaaccaacaaagtatttccaagctatagaaaagaacaactccatgttcactcgcccttgttcgatttgaactctcttgttagtatcagaaaactcgatatacatcagcacacttagaataagcattgctacaggcaaaagtccctttgatattttttcgatcaactcgttagcaacaggattgtatttatctagactggatagtagctgtgttagcgttgagccatcaattttcataagccacctcctattttttgattacattctaatttggcttaacgcagcaataatcgcagcggcaatggttgctgaaatcgcggccattgcaccgcctgtcaccattgattcaataccgttatccattttgttagggttatcgttctttcttcctgaaaagaaatcttgcgctcctgtaaacacaccgaataaccctctaatcgtcattactgcaccaatgacttgaactaatctatttaagatatccattaaatttacctacactttccttcgttttattcagcactcagctcttctgtatcaataattgtgtcgtactcttcctggctcaaaaagcgatcaatactgtattggatctcaccgttgtattctccctctttgaccttgatatagacttctttacctgtcagaaagtccgccgtttctttgttgtagtcaaaatcaatatcaggaatctcgtagccattatcttcgatactggataagatataaccaagattttcttcagcaaaatcatttccaaaagttaagaaagataagctgctttcacctttagttccagagacgaaaatcatgaacatatcagcacccttttttgacttttgcattacaaccttctcaattacagcttcatgaatgcctggagcaaatggaattttttcctcacgatttttatctggctttttatatttcattgttagtttctccttccaaaaattatttttttagttttgcaatgacgatcagacgatttggtgtgttgtgattgctgctgtcacaagttattaatgtcaaaattccggaattactttttgaatcctccatgtattgactttcctttttggaaacaaccttgatttcattcacttcatagttagcttgctttccacgataggttaatttaatgtcatttcccttttgaagatattgaacaccaccaaacagcaaacctctattcgtcatgtagtgccctaagagaacaaaattattctttcctggtatttgtccttcttttgccgttccagcacctacacttaaattggtttgagttaatccttctaatatcgggagtttcattgaaatagccgggatctctaggagtccgactccaaagttattaacttgttcaactggatcgattttattaagatccgttgggcttagcgtatggacatcagcagctgaatagtcagctgacaagttttctgtttgctttttcttagacttcttttggatctgttctgtagcctgtttctgtgctgcatgtacatctttttcaaatcctctttgtttgaaaaaaaacattgagaatatcagcaaggcaatggccagcaatgaacaacaaactatgattgcgcgccgcgcgatcggagaatttgctaaaaatcgtttcagtattcgaaattttttccggataattctcaccgttgtacctccttttgaataaaaaaaagaaggagaataaactccttcttcgtgtgacgattgactatttacttaaaaattgctgaaaagaactcttgaaaagcgttatagcttcctgtttgcggtattgacttttcagggttagaagcagctggtgtcgcagctttttcctgctcagtttctacttttttaggtcgaatagtttgtttttcattgtttaaatcaaaatggtccgcgtacttgtcttcgtatttttcatcgttaaagacttcatgcgtaacgaccaacttttcgccttccttcaaattgtatttcttcgcgtagtattggaaatcaacgttaaactcttctttgccgtttgtaactttacgcttgtcattaactgtttctaacacttcagacttagtgtccttagttgtagaactttcagttgcagctttactacttgaagttgtggtactgtctttagtacctttactacttgtcgtcgtagtagcactgctgcttgtatttgcggctgttttagtatcagaaactttatgaagtttgtgaacccagaacttttctaatcctacttgagattcagggaaatcttgactgactttatcaatcaatttttgatcttttgtcgcatcgatctcttggtctccatcagcagttacaaatagtgtttcgatttttggttcttcctcttcagggatctcaggcgtcaccgtttgttcttcgtttttcagatcaaagtgatctgcaacttctttttcttttccttcttcgtcaatttctgcgagtttttcggtccaaacataagaagtattttcatcatcatttgatgtatcaactaaggtttcgacaactttttccatgttttccgcgtcagatgtaaaatcttcatctgtttcataaactaattcaggattttcataatccttattttgaattctccaaagttgaatcccctttaagcggtacttctgacccttggtaacatcagaaattttaatagtatctttcattggagtatctttaccaggtacatatgtttgtttaccgtctacacttgctttcgtagagatttctggtgatttaactaagtgattcgtgatcattagttttcctaaagaaatgtggttagaaccttcgttgatttttctttcttcaacggtcagagttttaattggttctttttgatcttcttcagtcacattcattcgatattcgcgtttttcttcatcaaaagttgacttcaggattagatccttcatctttttgtatccttcaggcgcttctacttcagagattcggtaatcgccatatgggaactctttaaacgcccaatacccatcatagccttcagcatttgtttcagtttcaacttctacaacgtctcctttagttggatcaatcggagtaagtgaaaatttaattccgttgtaacctgaagctacgtcacccgattttgattgaagatacttgaatccatcaagtgataacttaattactttttcttttgaagtaacatcagccgcaacaaccttcgtatcttgatcattgtatttcaattcaaactcacgttttgtcgaatcaatctgatatccttcaggcgcttttgtttccaaccaataatacttccctaatgccaggtgttttacactagcagtttgatcttcatcatcgatgcggatcgcaatagaatcgtcttccgtttcaaccttcgtaccattcgttaattcaggcttcactttgtctgaccacttaacaggagttccgtcctgataatataatccatactcagcaccttcaaaactagctcggccttgcgtttcgttttgagtttcttcgtcttccttcgttaaaacagaagatccggtcacctcttggtttgtaccgtcaatgttttcaatgacaatcgcggttttttgatcctggtattcaactttcactgtgactggtttaaatgtgttagcaaacccgataccagctgtcttttcataaatgtagtatgttcccaattctacttttgcttttgcggctcctttttcattcgttgtcatggtgccaactaccttaccgtttttgtctttctcacgaatttcaaaaacatggtcagcgaatgaataattgtcattcagcaattcagatccgaattcaaggccttttttagttaggtttatttcacctgttgctttgacatttcgtgctgtcaaagtaattgtttccccagctttaacagttccttcaaaagtgtcactatctccaacagcagaagctaacacatatggggcgggtacagctgtttcagtaattttgtattttactccatgaggaagatctttaattgttacttctccattagttccagttttaaccgtctttttaccgggtgcattatcacctgtgaatactccttcaaaagttgtacctgggataagatcatttgaatctttgtccatctttctgattctaatctcacctgtagtattcgtcttagtatcaaacttataagaattcgggtcactgatcgctggtgtaattactgattgtgatccttctttagcccacatgataggcgtaccctccatgtagcttcttttcgcagcaaatgatcctgtttgtttagttgggtctttgggtgtgatatctaccgacattccatctgaagcgatttggtaatcaatcccagcagagttttgaactactgtatcaaaaagtcgtaaatctacatcagatgtaactttcttcgtttccccaaaagtaagctctattgtttttccatgaaaattaggtttcttctcataatcgtcaatggccttttccaatttagctttcaattgtgggtactctggtatttcatcgattgaagtaatgttcaagttatattccggtaagttgttccatacaactgctctggtagtaatttcttcatgctgtgacttatttggaaatacagattgccaaattactgaagcaatttgcgcgcgtctgtttagttgtgaatattcaactccctcatatcccccagtgatcgcaccacctgataacggcactcctggctgaatacagaaaaccatttctgccggaccgtctttaggtttaattgctaaacttgctgtaacatctgaccaggcggcgccattctttgtcccacgcatagtatataaatgttcttgatcataatatacgtcacctaccctatgttctgttactctcggctttaattctagtttgttttcttcagcactaacagttttactggttccaaaaaaaatagccaacaaacaaactagggttgaaaaaagataaaagacaaatgttaattttcttttattcatatctactttttcagtcctttcattaaaaaaagtgtagaagtatttacgcttttcatcaaaaatattcttgtaaatcattgaaatttggacttcctcgaatatcaatattattcattcttacacctttgctccttataaatttcttttcaacacaaaaaaagacctctaggtttacattgcctagaggttgcttttactatttaacttgccaatcttggactccatatcgacgagcgctgacatttttattaattagtagatcatcagcatacttatcaattgcctttacagcctgtgcttttgtatcataaatattcttacccgctttaatatctcataagcagttgtttcataaccttcatagaatgttgtatacttccaaactggtgtaggttttggtggggttgttgatctaaccaccactgctgttttcatcaacagcataccaagcaataccctcataacgccaacctactttttacaaatgatcacgttcactagtaagcaatgtgtagtgatgggaaccagcgatttgaaaaatagaatgtttatcgattacctcattttcgaataatgataggatcatattcggagttaaagtgattccaaccataatatttttttattccaaactggatcaacaatttttccagtgggtagagtaattgatttccttaacttcatgagaatcctcctttcacgaattaatccataatatcgttattaaacgtctattgtttgccaaacaaacataagtagaactaaagtcgcgatttttacaaccggagaaacctaactcctatgaaggccggatattcgctatacaccttcagggtgtgtcgtggcaaatccttcaacgttttggcgggcacaccggatcaatatccggttactctaagctccttagtagccctgctgttcggcttagagggggttctacatcccgatacttcaaatattcaattgagtttttggaaaccgctcgttatcagcgtcttccaatgtatgttaagaaagcaattttgctagttttctctagcaaacaatagacgtctaacaaatagtgatttaacaacttttttatttcttttgtttttgagcataaaagtaatctagcattttttttgcatgttcccggttttgtatcccctgcacaagctgatacacataaagcgtccggtcaggatttactttcttgtttactgacaaccaattgttttttctagtagtccgaagtcttgccccaacacaagccctttcagcaattacattctcctttagatcacaaataaatctaattttaggatagatctcgctaagaggaacacgcttaacttggactggaacttgttttccattctcaaacaagtagcaaaacctttcagcataaccacaattcaaataccagatctgaccgtctagtaactttatttttgtacttacggcttctaaatcacattctcttacatcgataccaatcgtacccataagactacctccaagtgatattaaatacataaagtgaattaatcttacctcaaaacaacaaaaaaaagggaacgtaggctaaactacgttccctaactcgactgtttgaagagtttcttcaaaatccgctttttactaatatcaaaaaaaatcatactaccagaaaatttgttcgctttttaagccaaaaatcctaacaatactattctaattttgatataatgacgaatgtctggagaaatccaagacagcagagggtacgtagtaaggtgcgcttactacctgcagctgatctgtgacggagcatgagaaactcccgagatcggctgagccttcggttattttttttcaaacaattcagtctcctgcttgagaggtaagaactaattcgttttcagtctaagcctttaaatggcttcaaatcaagaacaaatttctcgattgatattttcttcactagaccaattgaatagtatctttgaaataactctatatttcctctctcaaaacttttttttataaataacatctatctcctctctcccttcatttattctaaccgttagaaaactaatagtcctctgaataaactattttcgattatctcattaacacaacttgttgttttattgaatatcaaaaaagaacaaaaataatgagtccaagatccgcaatatatccagatattaatccgaaaatagcctctttaacttgagcactactaaaaaacaaactattctatgagattaacgtcttaatcttaaaaagaattataacatatttctaaccaaatgtgaacacgtgttcgtattatttttcagccgattatgatcgaaaatcaaccgttcatgatattttacccaatagtaataaatgagggcactggaacatccatacagaaaatagcggtagaaagacgaataattttagttaagccaacaaatcattcatctatatatcgggattaccttatgacaaaaaaagagagaggctgtgaataactcattgtcattaactacaagaagttggctccatgaaatcagtaaatgatttcatggagccaacttctttatgtatttaaagtaccgagacgtttcattgccgctaacttcctcatatttaatgccaggataagaatgcctgtctcttttttcaccttctccatccctagaacatggtatcgagtgaaatgcaaacaagccttcatccatccgaaaactggctctacatcaatttttctttgtgcgtagatttttccattctcaggttctaaaagcaaggtgcgttgttttgctttaaagtattctagcgaagaattgactttaatgatgcgtgtattgcccccttgggtcaacgcttcttgaatcacttctttgttttctgtatatttttctgctttgtattctttaaaatctcggacaaatccgtcggctttatccgtgtctgtcctgtatgtattgaaattgaattgaactccttttggatcaaagtagtattcctctttttcgttatacgtccaattcatgatttttcgttcatccgattgccatttcttactctgctctttcaacatcgtagagtagggaatcaatgcggtatggttcgatcgtttctcttcaaggtaccgataattttgttctgaaccatacccggcatctgccacaatatacctaggaagtcgacccgccttgttcattttttctataaaagtggggaaagttctcgtatccgttggattttgatagacatcataattcaaaatgaactgattactggtagctatttgaaggttgaacgccggctttaattgtccattacgcatcgaatcttctttgacacgcataaatgtggcgtctgtatctgtttttgaataactattccgaataccacaaatagctaagcgctgttggtgatccgccattttatcccgacgctcgcttagttttcgtttttgtgcttttagtgtacgacgttgttgtttggctggattcggtgaaacatctttggtttggatcacttcttgctccaaatcttctagtcgcaattccaatcgtgtgagtacttcatctaacctatctaatgtgagtgaggttccttcaggaatacgactcgccaaatgcgcttctttgagttcaaacatcaaagagacgatctgttcacgattcattttgtcgtatttaatggtgctctttttccaaacaaaactgtatttgttggcatcggcgagtagtttcgttccatcgataaaaatcgaatcactaattaatttttgctctctaaggtagtgtatcaacgaatcgagtcctttttcaatcaacgtttcttactcattagaaattcgaaagcaagcgattgtacgatagctaggaatctgttcttgcgtcaaccaacgagcagggaggctttcttcagctcgttgctcaatttcccgactgctaaatacgcttcgtgtataggcaaaaagaaccacttttaacagggcactcaaatcataatttcgagggcggccaaaaaggtatggttcatttatttcaagggatccaacgagttcattgataaaccaagcggtgctatcttcttttggaatataagaagttgagatatctaaagtgagttgattcgtgttataatttgtatgcatgattttgatcctttcgagggttgaatgatttagagtacgagcgtcctctcgtactcttttattttacctaaaaagctccagaagcgacgaatgaatcgtcatttctggagctttttttcagaaacttattatacgaaaactaaaactctaaaaaaacaaaaaaaggctacctcctactaatcgcatagttagccaaaatggtatagagcacttcaattaatcgtgattgaggtgttctttctatttgataaataacttcctccaagttcttggtaacgggactgatcggaaagcatccgataaatgattcgcaacagtagatgtactatcgcaataattgcttttttatgaccggcgttctttcttatacgaaagaaaaatgcccgtattcgattagatttcccttgggaaatcgccgctgctccctgagccaatacttttttcaaataagaattgcctttccttactcttttacttcgcgttttcccggcactctggttgtttcccgggcagactcccgcccacgaagctaaatgtccggctgtcggaaataccgacatatctaacccaatttctgctagtacgacagctgccgttcggcgattgattcctggtatttcctctaaatgttccacatactcttcataaggcgcgagatagtcgttggttgtttcttcgacttcttttatttgattttccaaacactcgatttgagtgagatgaagagccaacattttacgataatgtggtgtcatgaatccttctaaggattccatcaattgaggaacttttctacgtaaagtagtgtaaacacacgctagaatgagactttctgtaatgggtttgtcctcaaccaaggcataaagtaaggctcttccggattttctatagatatcttttatcactgaagtcaatttgattccggcactctgtaaaaccatatgcccacgattcttttcccgattcaagtcttccaccaaatgcttgcgataccgagtcaagtctctcaattcctgaatcggttccggtggaatgaaactggtaggaacgacacccaaacgagtaaggcgggcgatccattccgcatccttcatatcggttttctttcccgggatatttttgatctgacgaggattggccaattgtagctcaaaatggttctgtagaatccgccagacacatttccaatagactccagtactttccatactgatatgtgtgacgtcataggacaccaaccaatcagataattcgaacaacccacgagtagtggtatcgaagctagcaaaaaacttttccgggcgtttttttccatcaatagagcgaataacacaggcaacaatgactttttgatggatgtctaatccagcacaacaagaacgaaggacatcttccataataaaaaacctcctgaaaaaaagttcagaagaggctattctacttatagaaacgatttatttttatacgcaggttctatgacctaatgattggtacaaataagtagaatgatctagtttgtcactcaaggtcaacttggagaaaaacctcaataagtaatcgacctacaagccactcctgtcagttttagtatgacaggaaatgacctgtaggtcgattctttttcgttttcattctgtttggtggcgggaaccgccatgggtgtttgtcacaccctcatttcttattttagatctgtttaaaaataagtatatgatattcatttcaatatcaccgtacagttttttttttttaatttttgtacttccatgtgacgataaacaaacaaattgctaagcccgtcagggttaatccataaatctttcgatcatttgtactaggtagaatcccttctctagaggctttcgaaatgacaataggttcgaaacgacctaatttgttttcctgtaagcatacatggttcgttgatactatttacggcataccaaaacagcatggttgctagtgccagtacacgaagcgctgtcgaacatgaaatccatgatctcggtccaagccgcatattgttcatcattcattttatttatatcagtaggactaaatgtatagtccacaccgacgttacgaacaacggacagccctttttgagttatatcatgttcgatttcttccggcatagtaaaataaaaaacttccggtaatttatcgtcaactccatctacaagtacagccttattagtctttgcatttgggtaacctgatttcatattttcatcaatacacgcgcgtaagtaggctcctattttattgatataggcaaacattattatgccgccatctttacatatccgcttactttccactataactttttgacgctctctgtgtggcaaatgatacataggcccaaaaaccaaaactacatcataggtatcatcttttatttcgggcaaaagcgttgcatttcccaacgatgcactaacattgcgtaagtcttgttcattgattttaaactgaaactgttctatgtgcttgggaacaacgtcaatgccatgatatgacttgcatctattggataaatagagaccatagtatccggtaccgcatcccaactcaatgacagttttatctggagcaatgtattggttaagaagccgttttgtgtatataaactctatctgctcagctctgcttccaaaagctctttgattttcatcaaaaccggaatagtttgaaataatgggattcattttttcctccttatatgctcgatagtataattagatggcttgccattggtaggaagatattgacatttctataataggttagacaacaccctcttcatcgagagatttcttttttacaaggacaaatatagttgattgttccattttttgcatcaaaagacaaatcctttggatatgcttctgcgctccaaccaaaagagtaatccggcatatatcccatttcataaatagatttcacagtcatattgtgagcctgctcaaacacttcttcatccttaaaactaccgttgatagttcctaatccaatctgacaagacgtgattctacggtaagaaaaattctctggaatactgtatcctattggcattagtaatcctgcgatataggtgaaagtgtctttatctttcaggtattcacccatccaaccaatatataaatctaatattgattgttctacagctattttatcaaatagatcttcctgaaatattttctcccataatgcaggtactgggttctgtccaccaccatttataacctcgtacccaacaagcacagcatctggtatcgtaattattcttgtattcactaaattcgccatgtcatcctcctttaataaacctgtgtatctttcacattgtctgactttgccaatagaaattaacttttcctaaaataagttttccctcctattcattcgaaagaatcaaagttactttcccacctttctgggtattctctaatcttaattctcccttatggtattgtgccactcgttcaacaattgacagaccaatcccgtaattcgaggttccagaccggctttgatcttgttgccaaaacatttctttcccatgcatcagtgcctctgaagaaaagccaggaccgttgtcttcaaaaacaaagaagaatttttggcgttgtttctccattctgattaatactttgccgacttctgtatgcctgattgcattttctccaagattaactaatgcccgcatcagcatagtaggcgcagcaaaaattgtggccattgtttctgattggacttctaacgcaatttctttttgcttggccaactgagataaaacctgagctagttcttccttaacatcctctaaagaaatctgttctttttcttcatgaactacatcaaaattagaaacttgctgcaataaatcaatatattgtttagtttttattccagattcataaatatgctgaacaagttgctgttgttctgaatccaacgattcttctaacaaaagctcggcatttccattaattaccgtcaagggtgtattaatgtcgtgggtcaatgcagcaatttcttgtttacgctgttcttgagtctcccattgctgaactaaggactcttttaacgccaccctcatcccttccatcgactgcaacacacgattaaattccagaatatctgtagagtcatcaatcttggaatctagattttcttgagcgatttgtagactggcttgttcgactaatgctaatttagcttgtaaatagttactggtttttttagtaaaccaaataaaataggaaatcaatattaaggcaataccaatcaaaaaaagaatttcaaaattcgggaagagtgttctcaaagtcttattagtaaattgcgctttatattgccaagttaaaaatgcatagctcccatctgaaaatgtcacgtaagcgccggttggatactcttcatttctatttttatattgttgaagcgttcgtttaagttccgttcctgataaggatgtttcctgaactttgccggcttccgtaaaatagatataatgataaaatttagaattcaatttagaagaagaaactttgctttcttcaaggtgtgcaaggtcctttcttgctgctttttcgccggcatttgctgggacaattttcccagtggaaatcaaaatctgaaagagaatcaatgccaatattaaaatagctatgacgcttgaaaaagctaaaagcaaaatacgggtcacgtatctagttaagctgactgtttttactttcgccatcgataacctatcccccaaaccgtttcaatcggttcttccccataatctttgatttttgcgcgaatattttttatatgttccacaataacactttcgtctgattgaccttcatagccaaaaaccgcttcatataattgtgtcttagaaaaaacttgacctgccgactctaatagataggcgcaaattagatattctgatttggtcaaagataatctggccgtttcataaaagatctgcttactagcaatatctaaagaaaattgtccaacacgtaacacatgtgtatgcccgcgtgattctcgtcgtaaatgagcagaaacccttgcacgtaattctgctattgaaaaaggcttacgaatgtaatcatctcccccaagtcctaatccctgaagcaatgaatgttcatctgacttagctgttataaaaagaatcggacaatccacaaggctacgaattctttgacaatagtcaaaaccatcctcttctggcatcatcacatccaatagaatcaaatcagcaaatttggctttctcagagtctactgcatttgtacatgtaaaagtttcaactcgatacccttcccgcaccaaagccttttctacaaacgttagaatcttttcatcatcgtcaatcacgaaaattgttgtcatatcctcacctcattcatttccaacatacgtttaataggtttgattcacaagcgcgttatgcttcatttttacgcccctcccattttttaaaccaaagaaaaagaactactagcataaaaaaggttagaaaaatgagactacctgttccaacttctattttcgttaaaatggcgggcgtgttctccctggcaaaacttgcaaccaaaggaactagccgaattccccatgcacaaggaaaaaagtaccaaatcatttcgcctagccctgttaatagcaatgcagaaagcaaaagttcgactgctgcaatcgcaaaatttacattgcggccgaaacaaaaacctagccataaatgaaaactgtaaagaaatagtgacgagcaccagatgaccgccacaagcagcaaaacaaaggagaaagataacgaataatccactctgaattgagcgaatagatgataccctatccctacaagcaaacatgaaaacaatccgctcaaaactaatagtaggatttttgcagttaacattctgaattttgaggatgaattaaggagaaaatacgctcctcctgcttcgatttcttgatcagtgacaatggttgtcagccatgcgatgagcagtggataaattaaggccaaaacttgaaaatagttgatcataagccgattcgctgggtaatttgacatagcttgatatgctgaaaaaattccgataccaaccaaaggaattactccatgcaaactaaaaaaaggggttttttttagttttatacgatccgcttttaatattcttttaagctgactcatgataacgccccctgtcactaaaccatttcgtggtgataaaataaccaataaataacaaactgacagtaatgataagtcctgggaaaatcacagctgtatcatgtaaaggacttccagcctccaaagggataccatttggattgattccaatgattggtgccatcattcgtggtgggatcgcgaaaggaagataccaaaagtcgccaccagcaatagtttgacctgaacacaagatatttagaaatagaatacctaaaaaagtaacgaccgagttgaaacgacttgccaagaatagaccaaaaggaatttgccatgaccatgtgagcgttaaaacaatacccgctgtgatacctcgccaaaacggatattgcgaggaaaatattaccccagatatagttgtcaaaccaaaaatgagcccattgccgaaggccaaataaagaatacctgtccaaatttttccctgccatattttacttacaggaaatggcagtatatttacattatagaaggaaaaacgtttgtctgagtcaatcaaattagtacaaatcaaaccgacgaccatcggcaaaagtaacatataccaccaattataagcccccacctgagtgaactgtccgcccatcaaaaagatcgccatcaagctaactaataacgggaatattataagcccttttcttccaaaacttcgcttacctttcagtaattctgcttgaataaatctagtcatgatcaaaatcctcaacatttcttttttcttttactacgtccataaataatttctctaaagctgcattattttcaggtaactccccttgataaccaagctgaccgttagcgataataccgattgagtctacggtactctcaacttcggacaaaatatgactggaaagaatgactgagattccttgtgacggaaaggatcgaatcaactctcgcaatgcttgtattcccaaaggatctaagccattagtcggctcatccaatattaatagttttggtcgatttaatagagccagtgctaagcctaaacgttgcttcattcccattgaaaactggcgagcctttttcttaccagtatgacgtaggccgacaagctctaaaacttcgttgatccgcgattctggtatccccaaagttatcgtccggacgagtaaattttcttgtgcggttaagtttccatatagtggtggactctcgatcaaagcaccaatctgtcccaaatcctgacgtttccatgggtgattctcataaaaaatttctccttcagatggcttaattaaaccagcgatcatttttaaggtagttgatttgccagcaccgttcgcacctaacaagccatagacctgatttttagggatttccaaagacaaactgttcactactttttgaccgtgataggcctttgttaatttttttgtggtaacaatcatttccttcactattaattcctcctactacaatatatttataggttataaggtactactaatcccattagtaatcccttttatctatcatgttgcttaagctgttaaaatgagagggcaatggtcgggcatattcctccttggactttgcgtccgtgattaagtctgccaaccagctgctcattcacagcgttcgttttatgcaggttgaactgctgtttaccagtacgttcgtgtcacaccccagtagattgaatcggcaatgtgtttacgctggctttccattgcgacaaaactgaaggagctgattgtcttgaacgcagtaggtattgatgttgctaaaggtaaaagtgttgtttcgattctccgacctttcggtgaagtgatctctagtccctttgaactctgtcatacttctagtgccatcgacgacttcattcattctctttcaaacctagaaggagaagttagaatcgtcttggaatacactggacgctatcacgaacccattgctcgttggctctcggatgcggatttttatgtcagtgtggtcaatccaaaactcattaaagattttggaaacaattctcttcgtaaagtgaaatctgacaaaaaagatgcactcaaaattgctcgttacgctcttgacaactggaatgacctacgacagtattgctttatggacaagacaagagatcaactaaaaaccatgaaccgacagtttgatttttacatgaaacataagaccgctcttaaaaataatctcattgctcttttggatcaaacctttcctggagcgaatacttttttcaccagtcctgttcgaaaagatggcagccagaaatgggttgattttgtcgcctctttttggcacgtcgattgtgttcgcaaggtctctttgagtgtgttcactgaacgttatcggaagttctgtgtgcgtaaaggttacgacttccatccagataaaccagcgcaaattttcgaagcctctaaagagttgattgctcttttacctaaagacaaaatgaccaaaaacttaattatgcaagcaattgaacagttaaacactctttctaggactattgagcagttacgcctacagatggatcaaacagctgcacaattaccagaatatcctgtagttatggctatgaaaggtgtaggtccttctttaggtccacagatcatggcagagattggcgatgttcgccgcttttcacgtcgaggcgccttgactgcttttgcaggggttgatccaggtgtcaatcaatccagcacctataatcagaaaagtgtacgaacttctaaacgtggatctgctcaactgcgtaaatcactgtttcaagtaatggacgttttagtgaaaacatcacccgaaaatgatccagtttacgcatttctttctaagaaacgagcagaaggaaaaccgtactatgtttacatgactgctggtgcgaataagtttttgcgtatatattacggtcgagtaaaagagtatctggcttcactttcagaagaggaatgatttttgtttttgagagcataagttgaaaccagcgattatcggtggttctatttgtcatgccttcaatccagatagctctctttccaattttttgcttgactttttatttgcaggctttatctatctttagtatggagaataaatataaggaaacgctaaggttttcttttttaaggcgaattttaaaatgaacttagccacttcataaaacaaaaaaacgtcattgcccaatttcatgtattattgaagttcctacacaatcaataaaggatgaaatgacaatgacgcaaactgagaataccacatttttacgcaaaggcaaacaccttgattatgaagaacgaaataaaattgaagcttggaaacaaatcgatcgccctttgtcgaatcgtgcgatcgcaaaattactcggacgtgcccctcaaaccattcatagcgaagtaaaagacggtacggttcgccaaatcaggcgccaagtccaaaacggtaaaacctacgaatatgaatcgtttgtttattccgcagatgctggtcaagccgcttacgaaaacgcacgaacaaattctcgcaaacaaccaaaatgggtttcttcgccaaagttcatggcgtatgccgatcatcaaatgaagacagaaaaacaagcgcccgatgtcgttgttggtcgtgcaaagaaactcggcttgtttccaaatgagacaatcccttgtaccacaaccctttacaactatattgatctcggctggctggaaacaaaaaatattgatctgcatctcaaggttcgacgaaacaccaagcgatcacagagtaggaagaataaaaaaattctcggcgatttgatcgaaaagcgaccagatattgtggatactcgtgaacgttttggtgattgggaaattgatacggtgaacggactgcgcgttggcaaagaccaagcattgcttacattgaccgaacgtaaaacacgttacgaaataatcatcaaaatcgatggaaaagcagctaatccagttgatcgtgcactgactgctttaaaagaagctgcgggcaacgatttcgaagtgcttttcaaaacgattacttcagataatggtgctgaattcgctggtctaaccacacttcttaaagatattacggaagtttatttcacccatccctattcttcatgggaacgagggaccaacgaaaatcataatgggatcattcgccgttttataccgaaaggaacacgcatggaagatgtagcgttgaccaccattcgtcgtgtacaggattggatgaacaatttgccgagaagaatattgggttacgccactccgcgtgagtgtttattgaacgagctatcggagctatccttagccgctagataaccaacaaaaactaaataaccaatgaatttcaataagtggctaacttgcacttgaaatttgagttttctttttcaattatgatttaagcaaaaaaacaaaattaaagagagactatactgagtgagaagaaacagtttatggagacagaagtaaaggatatttgattggaacctcaagagctatttttccactctcatttatctcttcatcaaaaaacaaagccacttactcagtaggtaatttttctaccgtcattttctttgctcctttatacttgttgtcaggaaggcatctagctgatgaatcaatatttttacttcctttactagaatttttcgctcctcggctaataatgaagtaaatatccccattcttatatctgatagtaatttttatactacaaaatattgagttctcttgctttttcaactgctaaaactctagaattcacttctagttttcgataaatattcaatacatgtgtttttactgtagctaatgagataaaaagaatctcaccaatttctttgttacttctaccattagcaatttcttttaatacatccaattcccgcccagttaatcgttcgctattacctttctttaagcatatctctaaaacttgtttatgaaacttttgttcttttattccaagatcaatagtcaaagttttagaatatctttcaaagagcagagaaagttcttccttgtaataataaaagatagccaaaacttcatcggttgctgcatagtacagactctcatggtaaaggtttgttaaaagacgagcttcttctttttcccaaaggctaaaaagcttgatttttaataaacttgcatcgattattttcaaatatatttttcgttctcgactttcagctaaaatctcatctagcatagaaagcgtttcttcatagcattttctatctaataaaatcattgcatagaataaacgattattaagattttggtattcaggatattgatgaaattgaacaataaagtcatctttttctgcttcagttagttgatgatattttaggctatatcttaaaatacctgctctagtcaatggtccgatcgaacttgaagcagaactctgatctaactttttcaaggtagagtatgctagctctattttttcagataagtataagtattcagcataattgtaatagtaggaaggatcagcaatttcttgatcgctccttcttatttcagttagcatttgctctgcttctgacaatctgaattgtttcaaataaacacctgtaatcgtcacaaaaaaagtaagtaaataattctgcttcatttttgtacttaacttgaatgtttccaacatctgctttgctttttccatcattagaatactttgatttagttttccaagttcctcaaaattttgtgcaagtagcgttcgtccaaaaaaatttagaaaaggattaccccaattttgatttagtcttaaagctgccgatgcaaaatcattaacattatggaattcatcttgataataatagaaaaaggcattcttcaataaaataaaagcttttgatgtatcattcaaattcaaattcaaattctgaatatcctccaaatcagtgactttttggtggaaaggagaaaaagtatcatcaaaaagcaaacgtattccttcaagagcttgaacctttttagagcctgggtattttttatctaacgcatcaagaagaaacaaacaactttcatactctaaattcgagtaatgataaaaaaacttttggtaagaaaaatccacatttgttattgcaatttgaataggtatttctcctataaaggttattatccgcaaggaagtctggtgttgtaaaagtaaatccatcaatttctcatagtcttccagttctaacagtaaaggaaaaccttgtgaaaactctttttcttcaatgtaaaagttcgcagcttttctctttagagctatttgcttttggatcggtaattgttggaaaagcctcatcaaatattctttaaaaattggatggtactgatatacctgtcgttgtttatcagtacagatgatcaatagatttttgtggactaaacttgatatagtcatcttaaaatcaatagttatcccaagaaattttgtcaggttatttgttacgtatggaaaataagatgtttcaattaaaaaagaacgttcttcctctgtaagttgttgaaaaatttcttgtgtcagatagtccgataacaattgattttcctgtttcattagcattgctgcagatagattacttctttgttttgcggcaactaacagttgtagcccgcctatccatcctctggcaatctctagcatttcctttatttcagacggctgccaatgcttatctgttgtgcgctgaatgaaagcttttgcttcttcatcagacaaatgaaagaaggattcatctatatacgctaattcatcttttatttcaaattgacttaagtacaaaggtaatgtatacctagtcagcaaaacaacatgaataaaactaggtaattgttctaaaaattgttctaaagagtgcgtaacgactggatcttctactaaatgaatatcgtccaaaatcaaaaaaatttcttcatttgtttcttcgattatactatttacaaaataggttattaggctgtcaatcatctccttattacaagtattttgaaagaattccgaaaactcttgttttacatcacctaaattttcttgaaaaacttcaattatatagctccaaaaaacttgtaaactattacaatctgtagctaagctgacccattttactttttcgggagatttttttttaaaaaatgtacaaattgctgtggtttttccgttacctgcaccagcttctaaaaccataactttctttgaacttccacgttctatttttcgtagtaatgcttttctctcaatgacatctctacgaacttctggtaaacgaattcttatactagcaatgttcttttctatttttttctccccctttcagcatttctttctctagtctatcaggttggttaccttcggatgtattgtttttttgtttttaacacagccaaaaaaaagaacaacaatgtgatcgacagaagataaaaaagttcaaaagatacatgcctcaggttagcacctgactcaatcacttcaacgattttcaaataatttttttgaggtagccatttgatcaatccatctacccaacgatttcctccctcaaaggaaaagaagctgcctgatagaatcgttgtaagcatgatcagcatcgaaccaagcatattcgcttgatcactatttgatataaatgcagcgataaacagagaatatgctgttccaaataatgaaatcaacacaagcaaaaacaaatattgtgaaaaagaaaaaccaattgagataccagccatcgtttttactactgttaatattgctaatgatggacacactagtaaaccaaaagtgagcaagctatacgaaagtaataatttccaaaaagagattggtgcaacaactattcgttccataatttgtttctctttgtcttcactgaaaatatacatgttgacaactgctgacatcaataaaaacattaataaaaaaccaataatgcgacttccagtttttggatcattttgtgtcagtaggacatccgtattcttagaaggctgtatagcttgtcttacttctctttcaaaagcttcattttttatcgaggttacatttatccgatttttttcctttattatcactgcatcgtactctcccttaagtaactgaagcatggaaggttcctttgttaaataagaaaccgttaccctttggttagaaactagctcatgttgttcatctccaaaaacggcaacacgtaaaggagctctttcttgcccgctcatatacacagcaactattacagaaacgatcataagcatgatcatcattatcactctttgccgtttttgaatgagtctccgcccattattttttattaaagtaatcacacatagtcctccccattaaatagaaatccaatcaacaccatagttactaaagataacaataataatataagcagcacaggaagaaactgagagtaattctgatcataaatcatcacaaaaactgtatccaacactttggttacaggggaaaaattactgatactaaccattgttttacctaaacttgcaacagggaaaaataatcctgaaagcaacccaagaaaagccgttataagactcaatacttgattggctgttccttcacttttaaaaatacaacaaatcagaacacctaagcagctaaagaacaaatccaatgctaaaattaacagccatacaaatatcaacattctcccaccaaaatttacatcaaaaaacaaatgtgttaatccacctgaaaagctaaagaaaacgccagtgaatagaaaagtcgctattatcttcgcaattggaataaataaagatgagatgggggaataagctattcgtaaattgggttgtttgatccgttcctcaagaaagctattggctgagtaggtgcctgcataaagcgaactaaacactagcatagtaacaccataataatcatagctggacacgcttgttccataaagcccctctgtaagaatgcctaaaatagtagtgaacaaaaacggaaaggcaatacataaaataacccacatcggattgagaaacaggttaagtgtgtctctttttaagatactcataaaacgatacatattctcacctcgcatctctcaaagaacgaccagttaaatcaagaaacaccgtttccaaattatctgcttcaatcatcacatgttgtattttttggttttgttgaatcaatttagtgattacagcatctaaattctcaacacctttgatggcagttatcactaattcatttttttcatgttcaacctttataattccttcgacctgatatagctctctaagtgatagctttgaactgtcagtcaactgaatggatattttcctttcttccttacgatctttcaggctttgcttcgtcccttctgcgatgattcttccgtgatccataatgataatacgggtagcaatttcttcaacttcctccatataatgtgtggtatacagaatagtcattccttgttgacgcattttcttgatcgcctctaaaatatgatttcgtgattgaggatcgataccaacggttggttcatccatgactagaagttcaggttcatgtgcaatggcacaggcaatatttaaccgacgcttcattcctccagaaaaagttttcaccttctctttacgatgttctgttaagcctactgattttaaagcaaaatcaaccccatcttttaagttttgtcctttcaatccatataaagaagcaaaaaattggatattattttctgcagataaatcttcataaagagctagctcttgaggcacgatgcctaaatgctctttatagcttgagagatttttatctattttttcattacgaaataaaatttctccttgatcataacttaacgctccacataaaatattaatcgttgtacttttcgctgcaccatttggaccaagaaaacatagaatttctccttttctgatcgaaaaactgatatcatgaatcacttgcttttttgataacttttctctaaatgtttgacttcaattaagtttgtcatagtttcatctcctctgacttaagtatagacaaagtagagtagaaacaatatcaaccgaaaggatgaaaattaaacaaacatctgtctttcttcaatctatatttagacgtgaaaaaagaaggtttttccactaaattcaactctttttaactgtaaaaagtaattacaaaggtcagtaaaactattaatacaggtatcattccagaagaaataacattttcatcaaaacttattgtcactttattccttactcgtttcgataataatgtaaaaacgacgtaacccataactgtccccaaactatttgcaagtaggtcgtcaatatctgtagctctgttaactgtaaataattgactgatctcaattactagtgaaatacttacaccaaataaaaaagcatattttattttttcatatactctgctaattattggacacaaaaagcctattggtataaagcaagcgatattaaacagaaagcctaaactaagaccttctctaaaaggaattagattgatattcggattgaatacttgttctttaaaaccattgatcctatataactcacttaaagttggtataccaaaaacgttcagaaatgtcacactcatataataaaatagtaataaagaggcaaccactatccttattcttgaagacagtttattttttcttgtcaaatacaataaaaaactaaagacggcaaatgcgccgagtccatagatcaatttcaaagttaaaatagatactatagattcccaaagcccaagttgttgctccatactttcggccttctttctttaaaaactctgcttttaaaatatctcttattccatgtctttctttgcgttcaataaaattaagcaagaaaagaatcgactgttaaatattttgttgaacgcaatatatcaatgattttcagtcgattcagatcatgaacttacttttttgatatctgtttcaaagttattacacttatcaatagaatattgttcgctatttttatttcaatcaataaacattatcatcgatttcactgattgccttttcaaaatctagctggtgtgctaaaaatttcttttctttcggcgggaatgttttgtcaaattcatctaaaattgattcatcagggtacatcgcttctgaaaaatgaacgctgccgttaataccatctaatgctccttcaaataagggtaacgccataacggaagtataatacttgccatcaggcattgatatattgtatttctttgtacctataaatccatatggatgataatgatacgtgaagccaccaagaatgattgcattaaatcctaatcttttcgcttcagaaagtgaatgttcaatcaacatccgaccaaacccctgccgatgatactctggtgaaatactaactggaccaaaggtgataatagggtgctcaacaccgttcttatcgatcactttagctctcgtgtaaaaaatactgccgataatctgattgtctaattcgataacaaaagacagttcaggaataaaatcaggatgctttctgatattgtgaacaagtaaatgttcgactgcccctgggaaatataaattccaaaatgcgtctcgtgttatttcttctacgattctatgatctttttcttcttcatgtctaatagtaatagtcatattttcctccaaaattcatttattttccaaagagatcaatacctgcctaaataatcaaaccgtataaatgagtacaaaaaaagacgatagttttatactatcgtccaagattacaaaaatcctaagaaccgacagataccgcttctacaagcacaacaaataaaccttagtttatttgttattcagcttattgattagatacctgagacgctcaccaaacatactccattcatttttacatgattcgattatttttcgaaacaagtatagcaaatagggattcctatttcaatcattcctttggtcaaagtttatctaatctttttttcactgtatttataactagctatatatcactgtttttattcccatctaaaatagcgcacagcaataaaaataccaatgatgaaaatagctgttaatagcagaaccatataaagtatcccgctttcttctctaaacgtaatggcttttaataactttattccttgcgttaatggcataatatccgccactttctgcaatcctttcggcatgatttcataagggactgtcgctcctgataaaaagaacattgggaaaaagattgccgaatttatagctcccgttgccttctcactaggagacagacttgcaacgatcaaaccaatggcatgaatggaaatcatcactaaaagatacgccggaataaattgcagccagttgcctaaataagaaaaatgaaagaaaataatcaatacacctaataataacagcatcgatacaatgctgatcgtaaagcaaaaaagtaaatgggccagaagtaattggatcggactgatcggtgtaacttgatatcttttcaagatttttcgttcacgataggaagatagcgcgagaggaagacccatcacacctgctgaacaaatacccacagtcgaaactgatacaaaagctgtattcaacgaatcattactagaatccataaatcccataagacaaacaatgcccaacggaacaaaaataccaaatataacggaagacatttctcttattgatagttttgcttccgatttgtagagtaaccaaaaagtcttcatatcaatattcctccccaataagtgttagaaaggcttcttcgagtgtgtcttttttactttctaatacgatatctgttactgtaccactcgccacttctctgccattttttagaactaaaatctgatcacacaaggtttctacttcatccatataatgtgaagtcagaaaaatagtcacacctttttctttcagcatcagcaaatatcgccaaacctctctccttgctttggggtccagtcctgttgtcagttcgtctaagaaaatgatctccggattccccatgattgctaatatgatacatagcttttgtttttctccgcctgataatgttgccaaaaacgaatttatttttgctgaaagaccgaattcatcaagtgttttcacccaatcaatcggcttttcgtacaaggaatgagtaatttcacagatttctttgactttcaactgattttgaaaggccgcttcttggaactgaacgcccacgtattgaaagagcttctttcgttcttttcttgggtctttgcctagcaaggtaacgtttgcggaatcatatttttgtgtacctaagagacagtctatagtcgttgatttccctgctccattatggcctagcaatccaaatatcgttcctttctccacagtaaaacttagtttgtcgactgcacgtttttctccaaatgtttttactagatctttcacttctattgctttgtttttttgattgatcatcttttccctccaatcattttctggattcattctagccaaaaatgattggagggtggttcagtggagggtttttaataatgggaaatttcaaaatgaatacctaaggattaggagtaaaaatagtacaagaagttttcccatcacacggctttccggcactcttcttcatatgtgttacaaacttaatccccctgttaatttctctaatttgtcttctaataaatttacactagctttttgatctctatatttgtttttcgtcgtttaatattgtagtgaagtgttaatccttctctgatgtatcgatcaatttttgctagccacttttgagaatattaggattacagatatcttcttaccgctttttgatagtcacgatagcgttctccaaaacagcaatcaaatagttttcctctccgcgaatctgccaaactaacaggaatagcgccagcactgccattacaatcatcaaaacgttcggaaaatcaacgcaaaacccagatataacaaatcaaaggccacaaaagccggatttcgactaaaccgataaatcccagtagtcactaattctgttcgctgttgttcattaacgcccgctcgccaatttattcccatcgttttgactgaaataaagaataagagtacccctaaaaatgtcaaaaccaatcctgcatatccccagcccttttgattaacagcaaatagaaatggcgcaagaaactgaataagctcaccaaatccagtcatgactcgtaaaacaatttcaaaatacttttcacacgaactctgtttatctcccagtaaattaaccttgagtccctgtttttttagtagccatgccttcccaagataaatcaaatagaaggatgtaaaaataaacaatgcactgacacgtatcagcatgatgatccccctttcacacatgattgcttattcatgtgaacatccttccgtcaacaactaatctgctaacctgcttcaaaaatttatggtaagaataagatctttttgtagagtttattttattaaataaaaggctttttaagcatagaatgttgttgcttcacaaagtcaaacacccaatgaccagtccactcggtcattgggtgttctttcgaaaaaacatactatttacaatttaatatcagcaatattatctgtaataatccagtcatccatatttttttcgcgatcataatagaaggggtcaatcttctccaaatggttaacctcatagagcccgatgcactttttcccataccatctagttttttgtttttcagataaatttagttcttgttcaaaacctttgataaattcggtcgattcttcaggtgtcattttgtatttctcaatcactttggttaacacacctcgatgagtaatttccattttcccgcctttttcaacaaagtataggatatcgttctcttttgctcgcccaccaagcggactcttcttgccagcagccccgcgaataatcatggttttttcaccattgatcaatttttccaattccttgccttcgttgtctaaataaaccaaatgctccgcttgtccctctcttttttggtaccaatctctattttccattccttcagcctccataatctaaaaaaacttgttactaattactctatagtagtacagaataaatttctactcattttctgtgtcaaaattggtaaattttcaactcgctgatcaagagtcagccttccctcaaaaaactcccttcattcatcaatggcaattaaccatttcttgaactgaagagagttttgatttattttctagaagattgattgaataacctcgtgagagagcgcgacagcgtctatttcttttccattaaatccagttaatcgaaaagaaagattaaatttctcaaaggttgtccggtatttttctagctgccattgtccacaggaatagctgcctagagcattttgcttataatcgatattcaccactacataatcacgttcttttagatcacatgtatgttttgcgttatccaggtcgaattcttcataataagaagtactaaaattgaagccttcttcctcggcgatgaaaatcccttggtcacgatcatcggttaatgcgacccatcttgtatccattctatttccgttcgcctgtggcacgacatagttagtaaacatatctgcaactgttgaatcatagacaccaagatagccggcttcttttgaatccacatagttttctcgaggtcctcttcctaaatatttcacctgattgaggtctttgttcacatgcatggagatacctaatcgcggcagcatagctggtgcactatcaatttttccgctaggtgtaccttctaggttaaatagaatatctccacttccgtaaatcgtgtaactataagtacacttgtaatgccatgcactatttgttgtggaattaatcgtcttcacagtgacttgaacagcttgttcgctttctttccaatcaaaggaacttacgatttcatgttctaagtgaagaaaatcacgctttttcatctcgtcaatgatttccatatcgttactaattggtgcccgccacaaagtaaattttggtcctcgttcaaggatcgtttgaccatctcgtatcaatttcaagagcgttcctcttactgtatcaaatactactacgaagtttgcccctgtgatcgtcaatgtcgtttcaaattgttcagcctgtaagctgccacttgatacgatcgctaacccttccgttttaattggaagttcaaaattggccgatgccagttcgtagcctttcggagcatagtttgtcgttgcttttaaacggtaggaaatattcaagaaatagcttgcaccaggcttcactgaaaaattcaagacatacggcaaagttaattgaaggctttttcttgctggaattgaaggcagtgaaattgtgccatcttcaattagcgtttgatcctcaagaatcgtataatataaatcaaaaatttgtagattttgaaaatcaaagcggcttagcaattcgatttctccacggtttagatcaatggctgtagtttgaatcggctcaattacctttttgtattcataaagacttggagatggtgtgcggtctggcatcaacatgccatcgatacaaaaatctttattagaaggatcatctccaaaatcgcccccataacgataatatttctcaccggcttccgtgtaagattcgataccgtggtcgaaccattcccaaatgaagcccccttgcagcttatcatgggcataaaacaagtcttgatattcctttagattgcccggaccattccccatcgcatgcccatactcacacaaaatatgaggctttttcgattctttgatgatggtttccatcaatggctgcttcgtgggatgctccagccagctatacatcgttgaataaatgtccgccgcttcaacctcaaagtctccttcatagtgaaccaaacgagtagggtccatttttttcgctacttcagtcatttttacaaaattggtaccaaaagctgattcatttccaagcgaccagaagatgattgatggatgatttttatcccgctcgatcattcgaaccattcgggaaacataggacatttcccattttggatcgtcactgatccagtcatattttccagtcaattcaaacccatgacactccaaatcggtctcatcgatcacatacattccgtactcatcacacagatcatatagataagcagaagctggataatgactggtgcgaatcgcattgatgttgaaccgcttcatcaaaaggatatctttttcgatttcctccttcgatacgacacgaccatttcgagggttgtaatcatgacgattgacacccttaaatttgatcgctacgccgttaacaaggaagacttcgccagccaagcgaatacttctaaagcctaccttttgaggaatcacttcaattaatttatctccctcgaaaacagagatcaacagctgatacagcacaggtgtttctgccgtccagtgtgcgacattaggaatttcagcatgaaggctgctcttatctccagtgattttttgactcagcacctgttgacccttggaatcaattagttctacttcaacgctttgccctttaggttcacgcagcgtgtaggatagatccaacagtcctttttcatacttatcgtccaaatcggcaataactttgaaatcattgattccagcatatggtacccccagtaattccacatctctaaagattccactgagccaccacatatcctggtcttctaaataagtgccgtcagaccactgatagactctcaccgtcagatcattcgcagcgtcttcatgaacaaacttggaaatatcgaattctgcctcatttctagctcccttactgtagccaacctcttctccattcacccaaacatgaaaagcagaatcaacaccacaaaagcgcaaaagtatttttttatctttaaagctttcatcaatcatgaactgccgcttataaatgccggttggattttccgttggtacatacggcggatttatcggaaagttataccacagatcagaataatgcatcttgccatagccttgaacctgccaatttcctggtactttaatatctgccatgatttccgtatcaaaatcgggctcaaaaaagccggttggactatattctggtgcatccactaacaagaacttccaaattccattcaaatttttgaaggcatgcgtatacttattttgatttagtaacgccttttcattcgttggaaatgtcgaaaaacgcgctcttggttctaaacgattgatacgatctagttgataattttcccaaattttcatttacctgtcacctctacctttgtctcttcgttattcattatttttgcttttctttcatagcgaacccaacaaatccacgcaaagcccataaatatcacaagtcctgcgatattatagattagcattccaatcggactcgcctctcctacaggtaatgttccattaatttcagccataatcagctgtggatcaggaacagttgacataaagaatacaaaaacgaacagtaccaataatgcaactccagcaaaaatcccaaattgacgactaccaaatttgaagctgcgtggcatcgaatccttcttcaaacgcaaaccgatataagcaatcaataagaataataccggtagcagggatgttgacgctgtcatattaatcaatgtcgaaaggaagctgtccatgttaccgattcctaatgctggaatgatcagcagcatcgtaacgatcacgccttgtacaatcaaagcatttgtcggatttccttcttcatttgttttcaccagccattttccaaacactccctctggaatttccgagaaaaagacctttacaggtgccgcagtccataacgccaatgaaccaagactaccgataaacaaaatcaaaccaaccaatcggaccatcacgccgtttggaatatggaaatgagtacccaaaattttgaaaatatcaaagattccgttagagaaatttcccttcaaaacttctgtcggcacaacaaaacccacagctaccgcacccaaaacatacataattccaacgataatcgtcgccccaatcatggttcgaacaaacgtactatttccgccttttacatccttgatgtaaacaccgatactttcaccgccaccgactgcctgtaaaatccacgccattgtcatgaaaaaggtccaattaaagctgggggtgatcgattgcatcgaaaagtcttgtgctgggtccttgccaaagccaaaaacgacgataaaagctaacacaacaaaggctactcccataaacagtcgagcacttccagcaaaactagttacctttgaaatccacgaaacacctttaatacagacccaagtcatcagccaaaaaagtataattgaaataatagcaatgattatcgtgctgttaccaccttgaaaaatattttttcctccaaaagcgtaggaaccataaatcagtgtattcggcaataaagaacagaagtaaaatagattaacaaaaaaatacgaccatgctcctaaaaaggcccacttctctcccaaaaccgattgcagccagctatggacccccgattcttttcctgaattagcagacgcaaattccgaatcatcagaataaacggtaaaaaataaaagatactgccaaacaaatacccgggtatcgttgccaacccaatttgaatgctgttgttgacaatgctaggaaacgcgaatactgccgaaaaggtcatgagcattaacgcaactgaccccaagcgctgtcttgaattagaattttccatctcaaacatcctttcaataattaattacacattgattttatagcgctttcatgatataaaaaataagaaatgtttccaaaaacttgtaataatgttgactcttcatcatttccagaaaaggagtattcagatgtacagctcattaccaagcgatgtcagtattttaataaacaacgaaatgctaagctcagagtttcatgtttgcgaagttggatatgaacaatgtcgctcaaccaagcctatggagtacgctccaattgactattgggtgattcattattgtgtggccggagaaggctttttttccacaccgttttttcctgaaagaaaaattacagccggagacttttttatcattccatcgaattgtaaaaatgtgtattatcctaatcgcacgaacccgtggcagtatcgctgggtcggattttcaggtacgttaatggattactatttttcagatttaaaattagataaatccaattgtgtcatcagccattcctttgatcatcgaatggatgatctgtttcaagatatctacgaagcgttcaaaaaaaatgaacattttcgcacgatggcctcttccttcattctattcgacaacatcgatagaataaacaaaaaaacagatgatacaccgcaaagtgagcacctgtttaaaaaagttctgaattacattgatgacaatatctcagaaaatctcagcgtcaatcaaatttcggaagcgaacagcattgatcgaacctatctatacaagctatttcagacccataaaggtatcggacctagtgaatatattcaggagctaaagctgcaaaaagcctgttcgctgctgcgaaagagttcactatcgattactgaaatttcctatgaaaccggattttcttcctcttcgtatttttcaaaatttttccattccaaactgggcatcgctccttcgacttatcggaagaaatttatcattaattaacacgacgaaaaagctgcgaaattttccgcagctttcatttattcctccttcaattcatacgtccaatcctcattatacagcgagaatcgttctgcgcgataggcccaagcactggttgggaaatcagtgaggtcaacgttcagcacggtttcgccttcttctgtgacttccataattgaactggtttggccctcatcacggtagccaaagttaacaaggcgattgcctgtgttgcttaagtagcgtgcactcccgataatcttggtatagtaatccttccctaacgcttcaccaaaggtccagacttcttcgatggtcatttctgcgtcattaatccggacctgacgagcttctgagtatttttcagaggtttcttcgtcgccgcgagtaacagagatgttattgtcataatataaaatatcggtcgtctcatcgttatcgtcttgatccggcaggacgatcgccgcgtgctgtccgccgctggctttgacatcgccttttaagaaatatttttgatagctctccggccagccgctgctgtcgcccatgatccatttgatctcggaggtgtcataatcaattttcattatcgtatcttgatgcctcccagaaataataatgctattgtccgcttcatcatattccaccgaattttgatggaaccaatcgaccttcccgtcctcacgacttgtcgaatcgtagtcttcgtaaaaggcctccggtaaaatatccttcagatcaatcgttttttcgatctcgccagtctcgcgattcagttcgatcatcgtgtcctcaatatagttactgccatcattgaccgtcagtaagaaattcccgcttggcagttcgatgccatcatgatggatgacggtcatttctccttcgcttttacctgtatcgtttgcggcgctagagcttgagaaatcgtaacggtgatagattttccctaagtagtccgtctccagcagcacattataggtatccgcatcattggattctttggtcaaataaagcagattgccattagtcaattccttgaaaatatggctgttgtagcgagtcgaatgccagcgaacatcgccgttggcatcaaaggcataggcgcgttttgtacttgggatgacaaaggtcaattcgctgtcacctagatccattttttgtgtatcggcttctttaacatcaatcgttgcaatggatttcgctaacgttcctgtttttatcgttaccgttttctccatgctgttgccggattcatccgtcaaggtgaccgtcacttcgttttctgtatctgggtacaaacctaaaactggtatactgtgatccgtttcatagtcatcaaagctgttcttgatggtcgtcgcctcatccttgccggccactgaaatatcaacggtcattgcgtcctccgtttggaaaagcagcagcgctgagagcgggctggcatcgtaaggatcaagctggacatagatattgtcttctgtgtattcgccgctttttagcaggttctgatattttttctctttttccgattgcatttcctgccattcatcattcaaggagacagaaagctgttcttctgtgtccacctcatttgaaactgagccgctaacaccacagccggttaaacagactgtcataccaataaaataactgattttctttagtgttgccctcattcacttcctcctttacgaatattccttatgaaacctgacgaaacatttgatttttcaattcgtacacgacatcgcaggcttttgcgacttcctgttcatgggtaactaaaataatgcatttttgctgctcatgagcgatttcttggaatagcttgacgatttcacctgaggtcgcttcatctaagtttcccgttggttcatcagccacaatcaaatcatgctcgcagcacaatgcccgcgtaattgcgacacgctgctgctgtccgccagatagcatcgttacttttttctctgccagttctttggtaatgccgactttttcaaggtttgccaaagcataggcttttttatccgcttgctggctttgagcgatttccatcgctgtcactacattgtccactgccgacatgtaaggcagaagattgtaagcttgaaaaacgatggacacatccttgcgccgatattcccgcagcccaatttttttcaatgatgtatcttcataaagaatctctccactttttggggtatctaagcctgcgatcagggataaaaaagtggttttccctgatccgctagtgcctaaaatggcgtgcatcttgcccttttcaaaggttaaattcaccttttcgaataatggaccgttgttctcataccaataacctaaatccttggtagctaatgtcataaaatttcctccttcaatttgttaccttcatttttcataactgatcatctatgtctaagagatcaagattttcttcggattcaatcgcagaattccggctgatgataagacgattgaaaataggctgattcccagtccgatacctgcaagactaagaatttccattggtttcacagagatgttcagctcttgaatttcctcggtttgggtaaatggattgttgcccatttgaccgccacctcgtggaccgccgtttccgccgccaggcatttgtccctggccaccttgaccgccaggaccaccattgtttcctgccgcgttggcttcttgtccttcggcgttttgggaagttgtttgctgacttagtaactgatttccaacagcatttcccacgacatttccgctggctgccgcaatccctaaagcaaagatcatgcagataaaaatttcaacgaaaaattgtgagatgaccttcatccgtgattcgcctaacgaaagcaaaacgccaatctcatatttccgttcacgaatcgacagcatgatgatcagagtcaaaataatcacacccgccgctgcgactaaaatcacgatatttttcgcgaaactcgaaacattgtttaatggttgcagcatttgctgatacatttgatcatttgtttctaaactaaaagtatcggtatcgatcaatttattcgcctgtttgacgaagctatccatatttttaggatcttctaagttatagacggctgaatcgatcgtttttccttctgaaccggtcagtgtgttgaccatggtataagaagaaaagattgtgttcgatgggttcataaagttaaactgcgcgcccatgctatccccagaatcgctggttttgtagattcccttgatagttacttcgacatccttgtcatctgtgtctttaattttgaatgtatcaccgacacttaggtcgttggcttcagccaagctttgttcgatcaagacattattggtgccttcatcttctgaggtgatcgcttccccttcaacaagactagcagtccctgctgaaaattcgctataagagctgctttcagaaactcctttgatttggaaatcaccttggctcatgccgccaggagcaccgcctccgccaaagccggccatctgttcgtcagatgactcctccgtattttctgtactatcgttgctggcatcactgtcgctggaaatcggttcgatccctgagcttttatccgctgaggtgctggcttcaaaggaataggattttacattcgataatttcgcaatttttttcgcatcgctcaaatttaccggcgttcgttcgaagctgccgggatcaggtcggctattttcatcttctgaatcggattgcttaaacatcgcctctcgattcgtcgataaggtgacggtcgccccgacactctttttcgcgttcgttgttgcgagatctgcaccgctgcggatcgtcaatcccgccaagacgaaaatcaatatcgccgaaaagacggcgatcataataatactgcgcccttttttggcccaaaggctttgaatcgcccgtttcatatagttcatagtggttcccccttcatttgtctgtctgtagaataagcaagctggcttaaccgaagcttaagccggatgtaaaaagttttaaggttgatttaggaaagcatggtacactgaggaagtaataaatgaagagggagaaaaatcgatgattaatctattaatagtagaagatgatgcgacactttcagagaatataaaagaaattttagccgatttaggtgacattacccaagtttacgatggcgaagaaggtttgttcgaggccgaaagcgggatgtatgatttgattttgctagatttgatgctgccagaaaagaacggttatgaggtgttagcagaaatgcgggaaaaaaatatccagacacctgtattgatcttaactgccaaagatagcttagaggataaggtgactggctttcaaaaaggggcagacgattacttaaccaagcccttttaccgagaagagctgatcatgcgagtcaaagcattactaaaacgctcgctgggattatttgctgaaaatcagttagcctataaaaatatcacctgcaatctttcaactaaagaagtgaccgtcgatgatgaggtattgccgattcaagggaaagaatttgatcttttagtctactttatccaaaataagggtgtgattttgaccaaagagcagatttttgatcgtatctggggctttgattccgacaccacgctaactgtcgtagaagtctacatgagccacttgcgcaaacatttgaaaccgtcaggtaccgatcatctgtttaaaactctgcggaatgtcggctacatcttacaaaaggaatgattcaatgaatacagaaatttcgagaaaacaacggttaaaatttttcttcattaatgtcgcggcatttgcgggaatctttctattattaggctttattactctgcagcttctgcaaagctcagcctatcgtcaaaccgatctttctctgactcaaatggcggaaaatagccacctgatccagatggagatcaaccgctatcagcagggcaatccctttttggcgcaaatgcctgacgatcagcgcatggataaaggtcctgatggcaacaatcgcttcaatacccagatcatcctttggtctaaggacggcgaaattctgaacaaggatgtattaggtggacgctttaccgagctagagaatttaaccttagataaaaaaaatttggattccgttcaatcattaagcttaaaaaatactggagaagctagtcaaaagctctccttccattcctatacaatcaaagcagagaatgcggaaaatatcgcttatatccaatttttatcaaataccaatcaaatcgcggactccatgaagaccttcgagaccaccttgattatttgtatgatcatcttctggctgatctcgattggtatcagtttttatatttcaaaaatgaacatgcagccgatcatgcactcttggcgcaaacagcaggaatttgtcgaaaatgcctctcacgagctgcgcacgccgctgacaatcattcaaaacagcctgcagcagctctttaccaaacccgaccacacgatcctagaggaatccgagccaattgctcaggccttgaatgaaacccggcgcatgaacagcttgacagaagacctgttgaccctagctcgcagtgattccaatcagctgctgctgcaaaaagaagccgttgatcctaaagaattcatccagcaattagcacagccatttcaagagatcgccgaaatgaacgataaacaattcgttttagaaaacttcgccgatcagcctatgctgatcgatgaaaaacgcatccatcaagtactggtgatcctgctggacaatgcgctgaaatatacggaagctggcgaaaaaatcattctgcaatcagaaatctccaatgacaattggctgattgaagtcaaaaacaacggaccatccatcagtgatgaagacaagaagcatatcttcgaacgcttctatcgcgaagaccgctcccgctccaaagaaaccggtggctacggcttaggccttgccatcgctaagcaaatcattaatcaacacaaaggcaagctgaccgtacgcgattgggagccgcgaggagccgtctttcagatcaaactgccgatgaaatagtacacaaaatcaacggagctgtgacaaaaatcctgtcacagctccgttttctatctatttacttccacgtaccaatttcttctccatcgactacctcgatacccgtttgaaaatcaaactgatagtcctttggattcgtaacgatcagcataactacatcatccaatcccgcagaagagatcacttttcgatcaaagcgcagcagcagttcgccagccttcaccttttgaccttcggatacgagtaattcaaagccctcatttgcgatactaactgtatcaagtcctacatggatcaataattcaatcccctcttgcgtttccagcccaatagcgtgctgcatctgcagattcgccgcttttattactccatcaacaggcgaaacgatccgtccagcagctgggtaaatagctaggccctcacccatcattcccgttgaaaaaacctcatcctttacctcagttaaagggacaaccttaccagttacaaaagcatctagctttttcttcttaaaaaacattactacacttccttatacgaaatcagttcaatctttaattgctccaaacgagccttaactgctggatcagtgagaaacgccacttcggcagttcgtggaatcaataacgaagaattctttagaatataatcatctaaatagccaggatggaaaatcatcatatctaccccgtcgtcatgtaaattggcaagcagcttctccaatgtacgataaggatcataatccgcctgcatcgattccatatacagatagaccttcgttccattcacattgataaaggcatcctccgtcaaagaattcggcccctgaccttgaggcaatccagaatatttcaattcatgctccgtcgcgaactgctccatcgctttaaaataattggtactggttaccgcatgaccctcaaaataatctggctttttaccaaataaatctaaaaagcgttggtattgtgcttcaatctctaacataacctccgaaaaaacaacgaaatctttagtcgcctctcgatacattttagaggatttaaaattgccttcctcatcgaccaaagaagggattttttcaggatcagccaatggttttccaacacagatattggtgtgctggctaaaggcgatcggctcatttttcagcaattcaactccatgagctgtggtcggcatgtttaccatgacccccacactccggatcaagccttcctttaccgctttttcaatcccataattgaccgcttccgaataaccgaggtcatcggctctaaacaagactttcttcgagtacttcgtcattttcttttacgtcctccttgatacttaaaacataagtcactgccgcagatacgataaagccgatcccgcaggcaatgaagccattgatcatattggcattggtcccgcctacaaatgaaatcaaacaggcgaaattcgccactggaattaatgtataggcagtcacccctgtcaatccagcataaagaccaccagctagacctcctgccataagtccaatgaatggttttctgtagcgcacacctaagccataaacacctggctcagtcacaccgccaactaaacaagcagctagaaaactaaaggccagcgccttttcatttttattgcgtaagcgtaagaaggagcctagacacattcccgccacacacatgcttgaaatgatcgccgctggtgttaccagtgaatcctgtccgttttgggcaaaaagtgtaatcatcgttgagatcatcagcaagtgcatgcctgtcattaccaagaattgccataacgccgcaatcactgctactgccaagaatccgccaatcgcatctagtgacaataagaatttactaatatgttcccccgcaacgaatcctgcaggtcctaagacaattaacgtgattggcagcatgaccaccatcgtcaatgttggcgtaaagattgttcctaacgtagacggaatcaccttcttaaagaatttttctacatacgacatgatccaaattgagagaatcattggaagaactgtgctagcataattctgtgtagcgacgggaattccgagaatatcaaaggctgctccatctgccgcgatttgcgtgaatgttggatgaagcagaacgccccctaaaaacatccctaaaactggcgtaacgccaaattttttcgcagcagtataccccaagaaaaccgggaagaaataaaatcccgcatcgccgacaaatgtcaataacgtagctaaagagctgccttcatgaatccagttcagcatggatggtccgaaaacggccatgaccattttgaacattgaggccgcaatcagcacaggaattaacggtgttaaacttcctgccaaataatccaaaaccttattccctaacccctttaaagtaaaaggctctttttcttccttcgcttctacttcttcctgctcctgcgctttaccagtcagctctagcaaattattgtagaccttattgacagtttgaccaatgatgatctgatattgtccgccagattggacaacacctaagacaccagtcattgactttaagctctcttcatttactttgctttgatcctttaggttaaaacgcagacgtgtcatgcagtgggtcatgtttgaaatgttttcttcgccgccaacattttctaaaatagtttgtgctaattcattatatttagtcatcgttttttctccttacatttttttcgtataatcgattcatatgaatcattaaatagaccagttcatcttcatttgattcaatgccataaaattgcgcaatcaatgtgccaaccttttgtgccagctgatagatttccgggtgctgctccttgatcgaatccagcatctccattccaggtccaatcagctcttcgccgctgcgcatccgcttcaagtaataaaacatgtgcatgcaaaaacgattgtagttaaactcatcacgatcaatcacaatgtgcagatcctgctcaattaaattggtcgtctgctgaataatttcttcaatcaatacttcttcctgggaaattttgtactccgattgactattgacaaagtgcatggtgatacttgtcaattccccttttggcaagacgatatgtgtctgctcctgaatcattttgacggccttttccgccaaatgactttcctttgggtacatctgcgcaatctcgtaggaataattcatgcgaacatttttataagttgtcagacgctgaatagaaaactggatgtgatccgccaaactaaataccaacgtcggattcaactgcccatttaattcctcctgtgccatgctgacaatctccgcactcaaattcaaaatctcctcaggtatttccctcaataatccttcaaaatactcgcttaacttgtaaaatgtcatggtaatcttgttcaaatccgtcaactcataaggcgttttaggaaatcctaatcctttgccaaaagcaatcagatggttgccattgccatcaatcgcttcagcgacattattattaattttcttaataattttcatttactcttccgcctttccaataaaaaaaactctttgagcgcacactacaccctccttatttcaaagagaatggtaatgcctcaaagagtaacaatccatttttatttaattttcactacaaatatagttgattagtaaaacgttgtcaacatatcaaatcatttttcttcattcaaaatttttatgtgttctaaaaaaagagaaaaggttatagttcctcatgcgtcacaagccattgctttacttcagctactagcttctcaggataagaatagtgataatgctccgccaacttacgtgatagcccttcatacaacgcaatcgtttcctgcaacgcacgccagctgtctgccgcatcaaaatgaccaaatacaccgttcaactgctgaaagatatcttcatcaacccattcgtagataaagcgaccagcatgccatgtatcataattttcgccatggaccattttctcgtaccattcgatcgtctgcagcagcacctgtttacattcagcatcccgcagcttaacagtccataattcattccgtaaaatctgttttcccaaattcacggcaagaaaccaaaaagtgttcactgtataatcgaaggcctctgccgtgatcggagaagcttttggccattcaaatttttcaggaatcagccgctgagcctctcccgtcttatccagtagaactcgtgctccacgacgaaaccagtaaagcggctcattcttagctaactcggtttgatagttcgcgtacgaggtaatcacaaaatccacttgaaagccgccttcaaatagggacagccattccaacccagcacgactttcgaatggaattgccgtattcaacttaccaagattttcgatccaatccttcgaattaagataccgcttcggatcatccacgtacatttggatatccatatcagaatacgcatcagctccatgatcaatccgtgctcttgaaccagccacataagctacatgaacatccgactgctcttgcgcccatttgacaaaacgctgttcgactttcttatagaacgctgcactttccatttcacaccctcttttctatcgatcatttttcgttaaatccagccaaacttccgacaagcattataaatcccatcctcaacattgcgatcagtcacataatccgcctgtgccttcaattcatccaccgcattgcccatcgcaatactcgtccagcgtttatcaaacatcacaaggtcattcacatcatctccaaagaccaccacatcctgcgctggtcgttcaaaataatccaagacatcaagaatcccctgctttttgttatcatgctgacacatcgtatattcaggcacaaagcgcagcttcgcaaaatttatcggttcaggaattaagtgatcctgctccatcggtaacgccaaatagaacttaaaaatatccgccgcttcatccacattaaatgctggatcaataaaatagtctgtcggctcctgtctaggacccacctgctgccgaaaaagatcatttttcccataaaccttctccgaatcatccgtcgcgatcaatacaccgacaccttgttcctccgcctgatgaatcactgccaacgcttcttttttatccaacggcgtatttttcaccaatttatttttaatcaccacacccataccgcctgagcataccatgttttccaggcccagctcctccagtaagccgcgacacttataatgcgcacgtcccgtagcaatcgaaacaaaatgcccctgctcctctaaaagctccagcgcccgcttcgcactaggcaccacctgtcctgtactacgatctgtcaaagtcccatcaatatcaaagaaaaacaacttcttttccattccttcacccgctccttcagcttcatcacattcattgtagcatatccgaaaaagcaaagatcagctgttcgatgttcacgatcaaaaaaaggcatcagaaaacttttacagccttccaataccttttataatttatttaatcctcagaaacatagaaacacgtataatccgcatatttctcgacttttacttgaaaggcactatttgcaggaacgataaattcttcattttcactaactgttttccatgattcctcattaggcaataaaacagtcatcgatccttgcgtaaccttcatgatttcttttttctgggtattgaacgtatagtctcctgctaacataaagcccaacgtaacattttcgccgtcctccaaatgaatcgtacgactggtgaccttcccatcaaaataaatatttgctttagattctacattaaccttctcgaacatacatactctccttttttaaaatctatacatttcgcgcaacttttgtcttgtagcttttttgcagatacgtaaggccggtaaagataatgaccacaatcacgatccacgtaagagcagtaatatctagccctgtcacaaatttcgcagcgataatgactccaataattcctccaatagtaatccccaagctaagctttctagcatattcatttgttttaatgaaattaatactagcaaccggcatcaatgcggcacaagaagccgacatgataggaaaggctactagcggactcagccctaacatgtaaaccatagccatacaaggcgcatatagcccaacacccatagtcatcaacgctcctaaggcaaagtttccgacaatcccaataatcaacttaactcctgttaatccagtagctacatttccctctccaagaatattgatcatccctgtttgctttaacgtcatcaaaatcgcggttacaatcaacgccaatcccataacaaattgtactctttgctcaggaagtcctgtgacatatctcgaaccaatccaagagccaacggtagctgaagcaaccaataaaaacaaggttaatggctcaacctttaccaccgtaatgaaaataagcgcttccaacaagcatgataatgcatggctgacgtttaaggttccaggtaattttcgatcgtcatctagttgcctagtaaccttcaccaaaagtgtcgttggagcaaaagcaccgatacctaacgtatcaaaaaaatcagtaataaacccaatacctatggaaataggcatgctttcatcacccaaatctttccgatgcttgaagatgtctctgccgaagacacttacatgtagaccaatgaacccgatcaatacaaccaataatactgttttcatactttaactccttctagaaaattattaaaaaagagcagtcatcccatacgtttagtctgctttacgcattctataggtatgtacgtttatttcatactgcacaattttttacctctttactaactccctaaccctcttgaataccgcagcatctcaacaaataatttcatttaaatgaaattgaatgaaatagaacatatagatttatttacagctgctcatttattattgtccgaaaaaaacactatcattattagtgatttcctgatatacgtaatgtgatttttttaactttaacagatacaaaaaagaaatcagctactaaaaagcgcctaaataaatctaaaatagactcgtgacaaacagagaaaaccgttgtaaatatgtgataaattcactataagctagtttcatctactcaaaacatttgttagcacacagcgtttcattattgttatatatttcacatttacaaaaaaataaaaagaaactatctctactcgattgagtccttccagttatccttgctgcgacttttcatttgcaattatagtcataaaaaaataatttatcaagacttttttcactaatatgaattattttactgttttatccgcgatattttcatttttatgatcatgctctttttcgagtaaccttgcagatagaccaatttataaagttatcttttaaatgaaaaagtcgcacactcgtcatttgaaacaactattctactttcttttaggataaaacaaatactgaaaaaaatttaatccacgaaatcccgcaaatatgttaaactcagacaaaagcaaaaaaagaggagaattcttgtgactgaatatactggcttcgacaaaatttatcgcgacatcgtcatggatattattgaaaacggcacggatcaagatcctgccttggttcgggcaaaatacgccgatggcagccctgctcctactcgttttattcaaggcgtcaactttaagatcaccccagcagacggtattccgatcttgaaatcaaaacgcgtcttccaaaaaacgcccttgatcgaattggaatggatctggcaagaattatccaacgacgttacttggctgcaagaccacaactgtaaagtctggaatgagtgggttgacgacaacaataccatcggcaaagcatacggctatcaattagccaaaaaatgccgcaagctgccagaccatgaagaaaagcttaatcaggtcgaatacgtgctccatcaattagaaaacaatcctggctcacgacgtattatgactagcctgtgggacgtcgatgacctagacgaaatgactctagaaccatgtgtctgggcaaccaattggaaggtcaataatggtgttcttgatctgcatgttaaacagcgctccgctgacatggcattaggccaacccttcaacacctaccaatacgcggtcctgcatcgcctaatcgccgaccagctcggctttgagcttggtacgatgcactggtgtatcgatgacgctcacgtttacgatcgtcatatcgatgctttaaaagaacagctgtctcaaccaaccccagacagcgaaccaacgcttgtcttaccagataaattcgatgagaatggccacaaacgttcattctttgaacgccgcttatctgatgtgaagctggaaggttatgagcataacggtgtgattaaatacgagatagcggaataactaatagaaaatagagtcgcaaaagatcaaaaatcatttgcgactctatttttatatctattccatccattatttagctatcttacaagcaacatctttcagatttttaccaactgatagtacaatgaacctttatacaaaaacagaaaggtttgattaccctcatgcccaaaattgaacgtaaagcccatgaagtagaaaatgccatcgaagaagatattgagatacagggaaaaagatttcgtgtgtattttcaaaacagatatacgattctctctctggcagtcgacttattaaccggcttcttttacatcctcggcagtgtcgcagccctaacctcgatccctgatcgaatcggcatgtacttttacctcgcaggttcgatcttcctgaccatccgtccgattttacgaattatcaagaatatttttatctacgatgatctgaaagcagaaaaaaagaaaacgtaacatcaccctattttgcagaaacggaaaattgtatttctaagtaaaagctaaagaacagtttctatgatgaacagatcgcaaaaatgacggcatccccttatttaattgctaaaaagcggaagaaagtctgttgcaaaataaaaaaatggctacagcgaaattactaagccgctgtagcctatttctagtttggatagtacatattatagacaatcgtttgattttcctcggtataggtcaaaggtgcctcttcgttgaatgaaattctaaaaccttgcatttctgctacttgctccactccctcagaatcaaggtagacaagacctaatggaagatatccagaaacttccagatttaatccacttggacctaccactttggtccctacttctccttcaagttcaagctttccattatccggtatacggtaattcgtgtcatataagacgaatcctaccgccttcacgctggtccatttaggtaccccatcttcgtctatatagacatagaagtctccaccaatgtttgaagttactttgctgaaatcaatgattacacgccctaactgtttttctttttcatacacataagtgacttcttgttgctgatcagtaaatgtgccggttgcattttctggaacttcttttaaaatatagccggtaatcgtcttggcttttgatgtatattgctcgccaacatttccggttaacttctcatctggaacgattgcgacgccctcttcgtcaacataatgaacaataacatccgctcctttgacgggttccttcgtatacacgtaagtgacttcttgttgttgctcagtaaatgtgccggttgcgtttcctcgaatttcttttaagctatagccagtaatcgtctttgcttctgatgtatatttttcaccaatatttcctgttaacgtctcatctagaacgattgtattgccattttcatccacaaaatgtaccaatactgtaccttcttttttctcaggaaccactggtgaatcgtgattgttggacgagtggatatagccgagataatcatactctgaaacggaagtatcgggtttaaatgtactgcccttggctagtgtttctgttttcgctgcgggtaattcaggtgttgctgctgccgcaatgcttgtaaacccagttcctccaatgagcgctaatactagtagcgcttttttagcttgacggcgtttccaaaccaataggaggatacctgtagctagaaagatcattccacattagacaatggttttattttgcttctgctcccctgttttcggcagtgttttgtaggtactttgcagaacctgatgtgtatttgtttgctgcaaagttgctccagtagttttattcgcttgatttaccggctgtgcagtttttttctgataaattaagcggaagttctcctcgtcttgtgtaattgtcgcttctggctgtttagtaaccagattcttttgttctgtcggcgtcaacgtatcatataaagcgtactctgtcgtaactgttgccgttgatgcttccgcaaaactttctgctactccaaattgaagcaccccaacaatcattgaaagtacagccaaacagcgaatataatgctttctcattccattttctccttcacttatgttttttaattccagaagctgcttccgcagtctgatagtgattttttacttgtttcttttcttgcttcctatttttcctgcgaaaagcaagccagcgaatataataaagaacccacaaccctaacgctactacgacaatagccaacccaatgatttctaaataattcaaagtgaccactcctatctgtagcatgctattactggtagttgaaccgattgtcatttccctttcaccttagatagaacctgtttcatacgaactcgagattcttgcaatagtacaaattattcaatctggcggctccgataatttgtttacgcacaaataaagaaatggcagacaaataaagagcctattcattccaataagtaatccttttgttttctaaagaaagtctaaggttttagtgaatcaattgtgtgaaaaaaaataaattcgcttacctcaagaacacaagctttcataagatttttaaattataccaaattaaattcaaaattacatcatttttttattagaaataattacttattaaaaaaagcacttatctagcaacaaacactactatttacaagttattaattagttattttcaggagtcatttcattcttcatgctatacttaactcatcgaaaaaaaggaaaacgcctactacttactggagggttgatggatgaaaaccaagaagcaaaaagagttgattgattcttttttgcgcacactagacgatgaagacaaatcagtataccgtgatattatcgtttacctatccgaactcggttataaccccaaaaaggaacgctcgcatatctcattcaagcatagccggcacaataaacagatcgccaaaataggcatccgaaacaaaaaagagccctcgcatttttttgcgctgcgattttccgcctgcaacgactactcacaaaaatttgccgaaattgttcgtaccaacattgaaaaatatcccagcaaaacccccggctgcatcgacaacacctgcgactattgcgccggtgaacctgacactcatatctacagctacacttacccagacggagagaaaaaagcccattgcggcgccagcgcactggaaattccgaatatttgcgccgacgattccaacgagatcaaacagcttattaaagaagaacatgagtatttgttgaagtatgaggcaaagcgataaatgaaataaacaagagccgcaaacgatttaattcgcttgcggctcttgtttctgatggtcaaaaatttgaagtttcgtgcaaattttgacgaaaaactcgaaaatatgaagttcacttcaaatttactcaccttgccttctttcctcttgattcactaacacaaaagctttttcaggagtatgaatgatgccataacaatcaaatcacagacttgcttcctagcttttcgtattcctcaattattaatcgatccaacaagctaagtaactcagctaactttttcgcactaaacatatccttgttgctgctgaccagtcgcttcattcccatcgcactttgagacaaaataaattgagattcatgggctttactttgcaaggaaccattttctatcgcgcttaatgtggaatagctgatgcctaaaagactagcatattctttttgactcaaatgatactttttacgaatatcgcgtattttttcaggcattaaccagtttttacgctgcctatactcattataatttcggatcaaattttcatttggacgatcaaaatcagcatatctttccccacaatttgaacatacaaaataatgatgctcgacttcaagctccaattctttgaccttcacgctctttagcacattaatttccttaaagctgtcattcccacactcgtaacacattctttccatttaagacaccttccttctagattgattcatgaaatgaaataaacatcgttccgtctttgcaataatgaaatttgacataagcctctagcctaatcttggtcttcgatgaaaatacaggcatcaagaatttccagaccgatcctgtttgtagcctacctctcttaatgtgcggttgttcaggtcccgatagataatgctcaacttttagattcttttcaaggtaatacaaagcctcttcctcaatccattgaagcctgtttagtgtatcctgattcttctctctcgggatgatgcgacatcggccatttttatagtcctttttgaatgcattaataatattttctatttctcgagattctaccatatctgcctccaaggttacccttgagtaacccaattatagttaagataaaaattcttgtaaatagctttataacctttcctatataaaattacgctttttcaaacacatcgattcccaatttaatcagtgtcacaaaaaaaggccgtcaacattttcagatcgttgacggctttattcggaactgtattttccgatattagtttttgcggctatttctttatttcaccctactacttcacaaacggagcgactttctctgtcaactcctcaaaatccaactgattaacttcttcgatctgccggatcatttcctttggcaactgtggattcatcccgccgcaaattgcggcactgatggcaccgatcgtgtcggtatcccatcccagagaagcgcttagttgggcggcttttaatggatcgcctttggctaattcgacgatgacaaaggcggttggaatggtttcgatggtttccatgcctgtcccgatttcttcgtatagtcgttttaggatgacggcttcgtcggcttcctgacgcaggatcttgcgggcctgattcatgcggaaggttagggaagccgctgggaaatcgtgcccgtattctttggcggcattaatcgcgtcaaaggccacggaccagatttcttcgattgaatgtccctcgcgaactgtgtagctgatcgcggctgccaccgcacttgcgccggcgatggcgattttggtgttgtgggttggcaggcagatttccgcgacattttttactaatgttggcaagtcacgataatcgctgatcaatccaatcggggcaattttcatggatgctccattggttgttcctgtgacacccgtctcttcgatcggcacgccttgagcaattttatccaaagcctttaacgttgacgggccggacacaaaggcggaaacacctgaattgtcgttccattcccgcagctcagcaacatagtccgccacccgaatctgcccattgtttttcttgatcatggataggatcatcaacacgtttagcgtatcatcggtgatcgctccggctgctaatttgcgtccaaagacatcgttttcgttggatgcgattaattcggttacgccatcgggaaagttctgacggattttttcctgtgaccagcattctgtcggcatccccatcgcatcgcctaatgcaccggcggcgagtacgccccaaatcttttctctcacttaatttacctccgctaagttgattgcttctgcttgattgttgaaaggaatgacggtcatgactttgtcgttgagcttcacatgaccctcctgttggctaagcacatctagaaattgatcagaattcgtaactgtcacaaacgactcaatcgaatagcctgcttcggtgactttttccaaatctacttctagaattttctcaccttgaacaacagattgtcctttttctaccaatggatggaagccttgaccttctaattccaccgtatcaatcccgatatggatcaatacttcaattcctgtgtcgctaactattccaatggcgtgtccgcttgggaaaacagtttctactttaccagtgactggtgaaaccacctcacccttttctgggacaatcacaaaaccgctgcctaatgcttttgatgcaaagcttggatcagctgcctgctcgatcggtttgatttctcctgttaaaggtgaaaccaacacttcagatttcacgagacttttttcttctggatcgacgacatcctcttcttttttaaaggtcatataggttaacacaaacggcaccaccgcggtcgcgattgatgcaataactgcgatgatgactccattcatactgccgcttttcggatcaataaaggccgcaaagcctagaatcccaaaggacatcgcgtacatttttgtcgaggtcaaagccaagatcaatgaaccaaccgcaccaccaagcattgaaaaggcaaaacgtttcttgacaggtaaactaaatccgtagatcgccggttcaatgatacagaacaagcccgataccatcgctggaatcgccaacgccttttgatccttcgagcgcgtccgtaaaaagactgctaatacaacagcagtttgtgcaaaattggccgtaaaggacattgggaaaatgtagtctacgcccgattgcgccaagtttgtaatcccaatcgctgaaatcggccaatgcagcccaaaaataaccaatggttgatagagcaacgctacaactaacgaagtcacgacaggagaaatgccatataaccctgatacgccggcactgatcaatgaactaagaacattcgtcaccggaccaaccaccaatatcgctaaaggaaccgtgatcaagatcgttaagaacgaatttacgttgtgagcaatcactgctggcacgacctttttcagccatttttctacctttgaaccaacatagacaataaagataatgggaataaccgtgtattgataaccattcgccggaaacagaatcggaatcccgaagaaggtgttaaagaccggcgtttggaacagcgtccccttgaataacgtatacagcgcatcgccgctcgtcagtcctgtcatcagctctggaatcagtaaggttgctccaagcatcatccccacaaacgggttcatcttgaaggctttcgcactcgtgtagcctagtgtgacaggtaaaaagtaaaagactgtctgtcccatcgcgtgcaaaataatatacgcgccatcgtcgaccgacaaaacattcgtcgccgtcaataaagccaagattccctgcagcaaacctgaagcggttaaaattcctaaaactggcgtgatcactttggtaatcgtatcaactaacgtactgactaacccttttttctcttcttccgccgcgaccgtttttccattcaactgttcttgaaccacttgaaaaatatccgccacatttgtcccgacaaccacctgaaaccgtccgctggcaaattgcgcactcatgacatccggtgatttcaccacttcctcacgctggaccaacgaatcatccttcaaggtaaaacgcagccgcgtcatacaatgcgtgacgcttaacacattctcctttcccccgaccttttccaaaataaatgataccaagctttgatacttatccatgttgcttcccccttttttggcatataaaaaaggcaacactcaaacaagagactcttcatcccttgcttgggtgttgcctgcataatcagttacaatcccgtttatttaattagccgctggacatggagaatcaagtacatctcctcctccggataaatccgacaagccagcttctcttgtagataatgcttaatgatcccgacactctccgtcgccttcggataaaactgaaccacctgttcatacatctccggcaccgcttcctgtcttggttcatttattatgacacgttgaataaagaatttcaagtgggtaacgaaacgaacataattcagcgattccgtgtccagctcaatccccagaccatcttctacgatcaagaccaccttctgcagcatctccgttgtcaacaacgtctgagccgtgtcattgttcaagccgccattaataaagtgaagtgcgataaaccccgcctcatcctcattcagctcgatcccctcataatagctgatctgcttcagcgccttcatacccgccgcaaattccttcggataaaacttcttgatctccaataacaacgcattttgaatcgtctccccattccgaaaacgattcaccgcataattaatgtgatccgccaacccaatataggtattcccatcaaaggtccgctccagctccgcttccgcagccttgacgatcaccgtcaccatctccagccgattgatcggaacctcttcgatcaattgcacaaaccgatccgccacattcggagaatccaccacgaacgtcttttcgatcttatccttctcaaccgtctcgccaacccgtttccgaaaggcgatccctctgccgatcaagatacgctccagacccttcgtatcaatcaccaagacaacattgttgttaaaaatcttcttaattctaagcaagctctctccccatcctccgcctcagcaaactttcataagctatgatacgggttctttggggaaagtcaaggaggggaattttaactgtctgcatagccctctctattttcaatttcatcattttctaaaaaagtgattcctgtatggtctatttgccaaataatattaacaggatctttaccacttacactaattggattaacaattccaaaataagtaaaaggatcaccctttttagggtctactgcacgaacaaacaaatgaactttaatctttggatctagcatcatcttgatatttttattctcgatatttgattttttcataccattccaattaaaagttcctttatttttatcgatccaacgatctccgtgatcaactcctgtataagatttccctccgaaatttgagaagatgaaaatctctccgttgtgttcaagataaccttgaacccatttaccctgagttccaggatcgttttcaatatctcttatttccgtacgtgtatatcgccgtccaaccttgtatttatccatagtcttccccttctcttatagaccggctttgatagctactttaattccgtaattaatcctttttaatgtctataatctataaaacaaattaaatttgttgaaaaaattagttatcagcttagattcgagtatctttaaatctatgagcttaataattagtttcggcatctctccgctcttgaagttcaagcaaacgattacgcaagctttcatttaccgcatagatataaatcccgtgtatactgcgcttcattaaagtgtttaaagaattcaagataatttcctctttacacttgagcagttcacccttacttaagtcttctcggcccataaaggcacctgtatccttatacttggaaatatcaataactaaagaatcagttttttggtcataatcaattgatggtcctaaaaataccccaacatgattcaaatcaaatccttgtacggtatatattgatcctacttcttcaatagtatctgctctttcagcccatgttgtttttgattccgtcgtattccaaggcatatgcagaccatcttcatctacataataggttttttgatcttttttatgaaggtagtcaaaaactgatacgattcgtgctaaccctactttcttatccaaagtttcaatcttctctttgaggctttcaggacttggcataatctcgaaagaataatcctctgttgatttcggcaattttgaaatcttcttactgtgaaaattatctatccactttaaagtgtcttcagaactcttcatacggaattgatctgttagtgaataatgttcaaatccatattgttgatctatttgttccatcaatcctttagtccagtagcttttagttcgcaaaatttgctttggatcaaagatgaagattgtaatttttgagcgcttgatgatttcttccaactgatttttataataaaaattattgtagtgatcctctttagttaataatagatgtgcttcatcaattagaacaatatctgctttctttccttttttatccatctcattaataaaactcgtcggtcttaaaatatggttctttttcaaattcggaagactttccgctattgaatgatacgttttgatcatctcgccatgattcactaaaagataattatcggttcctgatatagaggaagtcttgtctttagctaaatcttgtaatgtattgtaaagcgatgctaaaacaacacttttccctgttcctgcttctccctcaatcatgaatactttttcctttgtactatcaatactctttttacagtattcaataatctcattcttgatttccagttgtttgggagaaagttccttatatggtgagactttatagatatctttattctgaattacatcagatgagttatcagctagcccgttttgtctcaaatactcccaaatctcattgaagagaatcgtatcgtaataattcttatcatagtaaccatgcgtctgtatctgtctagtttgactaacattctgaagcttaaacttttcatcaccaataaaatgattaattaaattcgtttctatgttataagtagccgattgattaaatttttcattaccaattaataatgtatctgtcagccctttacgcttcgaatccttaagatgagcgcgcatccttttatccacttgcaccgtttggccgatataagctgttgggcgattcttctcattacgattgtataaaatatagacaatcggatattgatcaatgtacgcagtggtgatttgtgacagttcaccacctgaaaatttgtgttgttcaaaaaccatttgggtcattttaatacctgcctgttttaaataagatataaatgctagtgaaaatgtcaaaaattcgacaaactttcatagctacaagtaatattaatctccacttattacgaagtaaatacttcttttaattcatcagattgcattaataattgtaacatttcttcttgtgagattatatctattaaaatcactccactaagtctcgttacctctttaagtagcaatctatagtgtgctcttgtaagtgtatttttattcttcataatgtcaatatattctaataaagctttcaaaacacttggacttttactataactacgctccaaaatctgtaagaatatatcttggttagaaaataaaatttttgtaaatctatatttgtcttcttcttcacaaacagtcgcgtgaactccccaccatagtctggaaatagagtttcttaataattttctatctgcttttcttctcgcattaggattcaaaatacctctatcaagaaaagtttttgtctttttatcatctttacttaaccatctttcaaatgtgtactcccataattctactaaagataaataactccagagtctctcatcgactgcctgaacctcagttaatttaaaattttcatacagtaaaatagcactatcaaaatcagaagagactctagggacaagttctttgtttaatttgaaatctacattagtttcaaaaagatactcgtcttcatctacacccaaatagttaaagtattcaagtgcccatactttatctttagttaaactactaaattcaaaattatctgacttaataaattgatttagctccgataaactactttccttaaagattttcaatcccatagttactcttctccttctctaatctttgtcaatccataagatagaggatcaccaactaagatattagccaccgataaagaatccgtctcccaatctactttttcaaaatctagatcacattcgtccattcttttttttatactagccaaccatgtagaatttgaatagtccgtgactgtctcttctaaagatagagaatatagtacacttgataaaacaggaaccagtatcattgctgatagaatgggctgatataaagaattgttttttaatgttctatagctaaaatagttttcttccgataacattatagtaatcttattttcttctaaatcataatcaatagctttttctttatcagatggatttctaataattgaaaaaatcgatggaaaattaataatcttattaatatccttatttgcaaaaaaactcattggttcacaaattgctaatatttgtcctacttcaactttgtatttagtattcttaaaatctggatgacactcgttatttatataattattaattttttcattcgaaacaattaataattgaagatccacgtttccttccaaaaatgttgtgccaatttcatagacgaaacttaatttcttttgaactgagaatacttctcgatacctagtcttagcgcattcaacatgcaaaattaatcttgctctatcttcatttaacatttcttcgatagtttgattagcaaattgaattgtaccttcgataatatatttagatttatcatgactcaaggacaccgatatgctttcaaggttgaattcaccattaatatcatcattaaaataggccaaaacaggatatggataaaatttctttctgattttcatttttacctcctcttaaccacagcaacaaatgcagccaaaatatcttgcttaaattcaacttcaatgagtatggttttcccttttttaaattttattggcccaaccttattttttttaaccctgatagggtttccaaaagaatccgtggcctttaacaaatcatattttaaaatacgatttgtttcgtctgaaatacttaattccaaatatcctttaccttgacagttaggtgtcatactaattttatatcttctagtatcaatagtgatgattcgatttacatcaacatctaaaatatcatttaagttaacttcagataattcctctggtccgaaaggatctttagaattctctttcttatcacctttagggttcgtcccttcttcttctttttccttcctcgtttttttatcaccaggaatttcttctttttcttcttttgataatttactcaattcaatctttgaatttccagaatttttgagttgaacctgattatttggtattttaggaaaactctcttctttccgaagactatcagaattatcttcttctttttcataaggaagataattccctgccccttcaaaatccaaagcctcttcactagagtaactaactaaacttttaacacattgtttcaaccaagtataaatcccttgtagatactttccagaatcaaaattctcccttccttcatagtcctgtgatctgctagattcccatttgtcgtgtgcagcaggctccatctcgctaagcttctcgttcacatcatctccactagcacagaaaactccaacaaaactagttgccccacgaaaatgttttttatcaaaaattctcatgcccatttttctaaacatagctacttgttttggataatcttttccttcaagaagataaagttctaaattatcatacacttcagtatcatattgataatcttcttttggaaatttctctcctttagtcatagctaaataatataggtacggtaaatagctttcatccgaagaatactctttaattatttgttctatattattcttacaaattgtaactccgtctacttcgactattaattcacctctaaatatcgcaacaaaaaaattccgaagagtggaatcgacaatcctttccctccaatttttcgcatacaaaaaatcatatattaatacatctgttcccgttgtatctctgaaaaacaaatttctattaaagaaatttagattctcaatttcattatcatagacaggagcattgtcagcttcagcattcccaaaaaaaccagtgcctctatactctttattctcacaggtatgactgactaatctagttacaccttgaaaagcttttattccttctgtatcgagtgtattataaaatacagttcttatagaggaacaagcgaatggcgcattcttcccaatcccaaaagctcctccctctcccatactcttattagagtttccgagtgattttacaagacctacccaattactattcttgtttttcagatcttttgatcctgttaaaccggttgtattaaaatcacttattttcaaaactttcagttgttgtccatttagtccatttatagccttttcaaagaaatttttcgtttttctattttccttccaagattctttacaactctccaatatagaactatattcatttagattcggaaattgatccgaatctattgaaaatagttcaattttaactacaaccggtctttctttgtccagcctcgcgtctacagaattttgtaaaatttcctttgctaaactagcatatatatcatttttgaatgtctcaactcctggatcattcataccttcaaccccaccaccatccagttttggaaatgaccatctatatttattaatcactcatttctcctcccatcactaacaaattttctattttcttagccaatacttgagatatcttaggcggtaccgcatttcctatttgttgatattgagaatctttagtacctttaaaaataaaactgtcaggaaatgattgtagccttgctgcttccctcacgctaattgctctatctttttttggatgaatccacattgattttcttacattgacgactgtccctgacggcttatcatattcaattctcagatatatcgtattttgcgttctttctggtgtagtataggtacttttcatttcctgtgataaatcatggaaattttgcccttctcttaaaagtttgaacctctttaaagctgttggggtgctctttgtcgcgatatgattgtaaattaattctgaatcacaaatataatgtctataatcgtttctttgagtcatctctactctattaatacctttgttctgaacatcagctaccaaacttacaggtaaaccctctaaatcttcaatggcatctctaactgtaaaagttttattttctttatattcgaaaaagttagaaatatcgttatatggaatatcttttcttactccaattaggataaatctttgtcttttttgtggaacaccaaaattgattgcattaacaacatttctaaactgattataattctcccctagaatcttatcgatgtattcaattacagaatatgaatatacttttgcaactaataaattatcaatttgtttatagttacctattaatcgattagtctcgatctcttcaataatttttattgactcttcaaaattaataaactgttccaatatttcaaagaaatatgaagagtatgtttggctttctatggctcttgtaaaaacttcaaactctggtttaaaataactatcatgttcactttccatcaatctaagcaatgcctttgaatttttacataaaaattttctgacctttgcttcatctcttctttttttacttagtgtatttaataatttgaataaggacttatttatcatatattctctatatgactgtttttctgctattaaagaaatgtcaaatcgaaaaatattttgttcgcttataacaatattttcttctcttaattcaatattgaaagagtcgatttcgtttttatcatttcgtgaatagaaaaaacgatgtttttcagattttaacatctttacattctccattacaaaaatctttggtttcaaagatttaattgctttgaaatactctttcaccaaaccgttattcgtattaattattccggttttttgtctattggcattagaaaaaccttgacacggaggaccacctattacgacatctacttctccaaatttttcgtttaataaattataatctacatccttaatatctgataaaagctctagatcatctttatggtttgctttataagtctcttttgcatgtttattattctcaacagcagcgacaatcttgaaagatttatttgaatcaaacccataacttaatccacctgctccagaaaataaatcaattactttgtacattaattatccgcctttaataattactagatgtttcagaaaaacaccatacacgtattttaacacttttttttaaagagtttagctctttctggagggtattcactatattactcagtttacaattactgttttaagtttttagaacctctaatttaaaacctgaattctttaaaaataattttcgttatcttttgttattttagcatatttgttaatgattaaaaaatgctttccaaaatatatgaatacaaaaaaagataaaacattgaaaagaaaaaaggcttgccaattaatctaaataagaaacgaaactcaagatacatcacaccagttcagattcttctgctttaaaaaattttttttaataaataggatctgcttcataaattccaaatccttgctccagacattatacttgattaaatcctcaacaaaaagagacgccaataaccatcagcctctcccacataatcatttagttatatatgcttccaaaaggatagattagcctgccctcttcccaaccccataaaccacccaatcccgctcctgttccacccgcaccaaccgtaacccaacaccatccaaatacttcccaaacacatccggctccttcagctcaggcagaaagtatttcactttagaatactcacagccaatgagcagaatcccgtcatcagtcagtattcttcttatctctaaaagacttccttgcaaattgctccaatgaaaatgattttgaaaagcgcaaattaggtcaaagctttttgaagggtaatgagtttcttcgatattacctctttcaaacgtgatcgtatgatccgagtgtaatctctgtgcttgttcgatggctttttctgaaatgtctattccaatgattgactcggccttgaatctttgactgaggtagtacgttgttgcgccattgcccacacctatatctaaaatgcggtgaaattgttttgctggtaagaatgacaggcaccattttgccatgggcaagtacactttattccataatttcatcatgacactccctacccgaccggttggctcttttgattggtttagaaggtatttgtaaatgaaaaatagtcccactactattattaataggataaagaaacgattcatgtcttgtcctttctgatgcaatctaaagtaatgatgtttcttagattcatagtctggaatggtatccttacaaatccaatactaccttatctacgatcttttaacttcacatttctctcgttactcacattgtacttcacttcgacatctactaaataataaacaacatgctgtaagtcctcttctgttacatctgcctcagttgcacttgttgtttgtttatacctaagcttgacaacgttcccttttttgaaactttccggttcctctgtttcaaataatgcttgatctaaatagctgtcaaccaataccacatatgacttctctcctatggttcgaacactcgtaacgaagaaatagtctgtccttgtttgaacaggatttctgcctagaagcaagtccaaggactgtacttttcttggatttgagatagccactctttcctcatcctcattgaacaagtccataggtgttacttgatctaattcatcataggtaaaattaatgatctcatctttttcgtatttcaatttcgttttcgtatcccactgtaaaagggtgccacttgaaatatcttgaaaaatcacactatgaccataataggccttagatgcgcccatcggaactctattatcaatactaattacttttgctattgtatattttctcatcatatcacctactatctattattcattataacttgtttttctcagtgcttaagcggacaagtctaaaaaaagacactatctgcgtttgctttcataaaactattataaaagaataaagacaacaaaaatagtcgcctcatgaatctctttttcataaaatctctcctgctatttatttgagattaatatttctacaagtatatgtttaaataatcttgtagcagaaactccttggattgcggaaaacgaaatgttattcaacccaaataacaattgaagaattttgagacgacattcgctcgtaaaccatagccatcacaaaaaacctcccgcaattcaacaatcaattgtcaaatcacggaaggaatttcccatacttttaaattttagtgattaaccgctacttaaagcccccatcagtcttcttcgtatagtcgtattctagttcatcataaggaaacatcgggcgctggatttgtttaaaatccagcttttctgttgcttgttgtgttgggccgtcggttaaggccatcacgcagtaggctccgtaggcgtcgaagtctggtgagatatagccttgttttactatgatcacttcgtagtcttctatggagacatttgcccacataaattgtgctagttctgtgaagctcactgattcgcgctgcactagcaccgtgaggggatagtgctttaattttacaccgatcacgcatcctgtgatggggtctttttggtaatcttgactgactactccttttgagacgatcgttccttctagtagtattgctttggatcgttcgtcgaggtctgttcctaaattgaactgcactgcctctcctaacgcgtgttgatttagctgagttgtcgctttttcgtcaataatgcctgcgatcaaggttggtttctgccaatcgggatgtgtcttcaataagtgtcgcaggatccctgtactgtagccatcgctgccggcaccgcagttatctcctgaatcggtgatgaagattggttgctccgtcatattctctacctcggctaacacctgtgctaattctccgtaattgccgtgatagtgaaactcataccgtcggcgcaggataaagtcgtatagttcatcggctttttcttgggcgtagcttcgatagcgttgatcggctggtactattgttacggcacagcctaagcgatcgctgtcatgccggacatagcctacatgaaaggacgcgcagaggattcgttcgtcttgttctaattcatcaagcttttgattgatggatcggactggttcgtctgatgacaccgaacgttcgccgcctacgatgatcggcagcttgcgacagactggttggattactcgtgtgcgttcctgtaggatttcacagaaaagggtcgctgttttgtcgaatgtttcttgaatatctgtatgtggcgagtggcggtagcaagtcaccagattggtcatctttgcgaattcttccgtcacattgccgtgggggtccatcaccacggcgattggcagatatgcgcctactaattttcggatctctcgtaaaatcacaaactctgctgatccttccggcagattcatcaccttgctggcaccatgcagatagagataaatgccgtcgatctcacatatctgctgtttcaccacagctaaaaaatgctctaggatatagtcgaacgcctctcgttcgatcaaaccgcctggatgaccatttgcatagaaacctgggattagctggataccttgattatcaaagataggctgaatgcccatctttgatatcatgtcgttgccttctgcaaagagaaaattttctttgttcatggtttttggcgtatgcttgttgctctctgaattgaagaatcctactaataccttcatttgcgtttctccattactgtcatcatattttgataaacgccttctgcattcatcaagccgaaatcggtggagttgatcaccatgatggggatctcagcgggtacttctttgcggacatttggtactgcgtagcggacttgaggtgccagcatcaccagctgtttttcgtgggattttggtccgaccttttccagacctactgcttcgatgtggagtgattgtccggctttttctgctacttcactgattttcttgcataagatcgcggtactcatccccgcttggcaaactaataatacgttcatgttcattcttcctttctttctagtaaacttcgattgcgtcttctgggttttgttctgaaggcatctgttcttctgccagcttctctttttcaaacaatttataaaatggatagtacaccagcatattggcggcaatacataccaccgtcagaatcactgcccgataatcaaggctggacaaccattgccccacgcccaccggcactgtggagctgacattgatcagcgtacgattgaccaagcctatcgccatcgctccgtaacacaagaaaatattcaccacttgggtcaatagaaacgggatcaagaaaatcgggttcaaaacgatcggcagtccaaacaacaccggttcgttgatcccaaagattccgggaatgatcgccagcttgcccaccgtacgaatctgaatggatttgcttcgcagcatcaacagcaccaagcccaatgtcgcaccgccaccaccaatggctacaaaattgaaatagaacgaactcgtcacgatccgaggcagctccgttaatggtgttcccgctgcataagcggccgcgttttctaaggtattggcatcaaaggacggcatcaccaccgacaagatggcactgctgtggatgccaaaccaccagccgagttgcgagaccaccgaagcaagtgataccccgaagaccgtatccaccgccagattcaacggctgtccgatcatcattaatagttttggtactgatgtcgcgaagacctccgcaaagatcatgcggatcaataccatcgtcaaaaataccacagctaatggcaccagcgctccgatagattccttcagcgatgccggcaccgtatctggaaaagcgatataccccacgcgttttcgcaccagcagatggtacagctccaccgccgcaaaggtcgtgatgatcgctgaaaagaggcctgttccgccaaagtaagctgtgtcccaattccactccacgtactggctattaaccactaaaaaggagaccaatgccaccagcatggttaaaaagacattcatctgacgtttttgcgccaagttataggcgatcgccagtgacaggtagatgccctgactgcctagtgtcaccccaaacaagaagttcaggtgcgagccatagaactccgccgcctgcgcccagcccttcatcacgggataaaagacgtccgttttagatagcaaatgataatccacgattggctgcgacaagatcaacgcaaaagaaccaatcaaaatcaacggcagaatcgtcatgaaggatgtggcgatcacttgcaaataaagattgcccgccagcttcgccgctaaaggtgcaaagagcttttccaagacattggagaacttctgtaattgtttactcatagctttccgcctcctcacgttccatctgatcaatcagcagctgacacatccgactccacgagatcgcattggcaagatggtcctgcgcatgggtcatgaccagagaatacggcacctcttcctcattgacttctgcttggatcagctttgtttggatattgtgcacttcagccatgcgctcttgtccacgcttcatcgccaccaccgcagcggctagattgattccttcaagataagcgttcatcccttgataaaaatcatccatcgcatcaccggcgatgctgatgatctgaaacgccgtcagttgtacttcttcttttgtcatgtttttcgtcctccttgttagtagaatgctgcataagaccaatcacaaatacgatacttcccgccacgacccagctataggtcaacaaatcgctgagatgccacggctcctgaaacaaaaacaccgagaccgctaacatcaaggcaggattcaaatactgcaggatcgccaacaccgtctggggcagacgtttactggcagccataaataaaatcaagggcaacgctgtcgcagcgccgctggtcatcaataatagattgccttcccacatgggcaacaccaacggcatcttggtgacccacacgatcaccagtgctaccggcaataagatcaccgtctccacccacatccgaaacatcggatctaatgccccctgcttttccaacacgccataataagccacacatagtgccatcaacagcggcacgagggataacgacgcacctgccaccagcttggtgaagatacttcccatcaataacaccaccgcaaatcgctgccagacattcagctgttccttgaagaaaaagcgcccaaagaacaccgtaaaaagcggcgaacaaaaataagcaaagcttgcactagtcgtctgaccactggcgacacaatagataaacgcgccccagttgccgccgatcgaaagcgccgctagacacagattccgccgcaccttagcatctcgccacaccaccaataattgctggaccagcctctcttttttgaaagaacaaagacacgtcaatgtcatcactataaatgaccaaatgatgcggtatgccaacaactccagcgagtcgatgccttctagcagcttccaaaaaatcggcagaaagccccagatcgtgtaggtaatcactccataaataagaccttttttgatagaaccaactccttttcatcaaccaatcggagaaagcaaaaaagcaggcccgacacatctcacactttttgtgaaatggatcaagcctgcctaacagtcaccctccaaatggttgaactattcaatttttcggtatttcttttcaagattcgttgcaacgatcgtgtctcccttcttcttaccaaatccgatgccctttttcaccaagacccactctcctttcccttcacgagccaccacgacattatgcgtcaacacctgaagaaccaccatattcccaccctttctgataagtaatgatttcaaataaaacgtcagcgatttcactaagagactgctcactctattgcgagccaaagcaacacaaaaaaaaggtatcgggcgtggtctgcccaatacctttgacatagcgaaataaacgtataccgcacctcgaaatttccccacaaaaaagactagaaaaaaagcttaaatttggtacaataatgaggtcggtgtgatacactgactatggcaacttgattggtcagttggcgctgacttttcaaggctctatgttctgggtccgtccagaatgtagagtgccttttttatttgattaattaaatatctgagtccattttattgaaagcggattagcctgtcaagcgaacaaaagatttttttgagattatggtcagaaaaatgatgctgatcgctttactccatacactattaaaagttaatacccccaacaatttttttctaccccaatttatccgttttggggtagatttttttaatttcgaactcactcatctcgctcttcaaactccaacagataatgatcaatctgaccgttttctatgatcttcatttcgatcgtatcccattccttatggttcaaaagtttttgaaccaactcgttttcgatctccgccttggttatcgtgcctacatcataataatctatctcaaataggtcatcgattttatttccttcttcatcttcttcatagcttgagaaaatgacgtaattgaccacaatctcattgtcccttcgtgcatgtctcactaattcatctaagagcacgatctcacagccaaaatacctcaatacctcttctatttcttcgtcacaccaattgtagtggggttcatttttttcaagaatttgttgaatttcttctttttgttcttcagttagtgattcgtaagtaatcttactatcgatcgctccatctgcatcgcttttttgttcaactctatataaaacgtttccatttcggtctagtatattgaactttaatgccctttgaccgttcaacagcgtgatccaaattgcgcgttcagatcgatacccgccataagttaattgtgttttttgatactctactgtcaccttttcatcctccttaacaacagttttcccgtcattattatacaatgaggcaatcgataaggactagctgatttcacgatataaaaaccccaattacgatttatttttaaacaaaatgacttcgtttctaagaattgaacttaaaaaggatcgaacactttgattcgtgttcgatcctctttctcaaccaagcctttccaaaacattcgctatctcgattagaacctctggatcagtctcagtttctttcaattcctgcaatagaacaatcgtagcgatttttgccgttttcaaaaaacttgaatatcttgaaaaatcaatgataaatagaatcgcttatttttctttatcaagaccaattaattcacgttgttttcggttggactcgtcaccaatatatttaaatactgtcttaatctctctgacagtcgccttattttggagttctgaaaaattacgattgtacttgatcataatcgcctctactttttctctctcagtcatgtaacatctcctccaatccttctcttgtatattttattggtaatgcaagttcaatattctctatatccataatcgaatctgatcattcattttgaaaatcgtgttcgatcctctccctcaattaagtcgctccagaacattcaccatcttggacgttatttattatggcagtcattctgcacttaactccttaaacccgtttgtaaatttctaaacatgttcacatccgacggaaaacacttacatttagctatccgatatttatactgataagtgaagaaacagtggccacatcgttcttctaatcaaagatagatcttaacgcttcacttagtaatagttcgaattgattcagcgtcgttccgaagaaaaggtttggctggtatgcggacaagacgcgcggggcatacgtctctgtgctgatagtcaaagttgccaactgccctatttttgaatttttctcgccaacaaaggcgatcagatcaatatgatgatttttagccatttgagcgagatccgctaaccgaaaggtatcacctgagttaaagacaataaaaatcagtacatccttttcaacgttttcccgcaggaattcaagatggctattcgccgttgctcggaaaccatagagattcagtgtttcagaaaaatgattcgcgatattttgtgaaaagcctgaacctaggatcatgattcgtttctctttatactcagttagcaggcgaacaaacacgtctctttcttcatctgagaaattcttcgtcgggttcgttgccaatggtttacttccatacgcgaagaccagctcactataaccggaatagccgatttttttcgccatatttacgatggtcgccgttgaaacataagaggctctagcgacatcgcgaatacctaaatctcttagtgaatcacgatttttatccataaaacgtaaaacggctgcttctgaatcattcaactgatacttatcaatcagcgtttcagtatccataaggtccacctcaaattctttagttaggagtattataacatgacagaaaataattttattcaagatccatgggcaaaaatgacgacacgaaatggccttcaaggtgatgaagtcatctcagcattacagaaatccatccgcagaggaaaagaaaaagcggcctgtgaatttgcctatgaaatgtatattacctcacctcaatttgaagagaagctgtggagacgtttattagccatcagcgttgaggacgtagggatgggaaatccgtatgcagcaattatgatcaataacttaaaccagatgcgtaaagaatttcaatataatgaatctgaccgagcaatgtttttctttcacgctattcggtacttgtgcgattcagaaaaggatcgttcctctgatttgctcaaaaatatcgtgataaaaagcttcgccatgggttatgtacctgaaataccagacatcgcattggacaaacacaccacgcgcggacaagaaatggggcgcggttcagaacatttcctacatgaagcaagcaaagtcattcctcaagcagaggttgaaaatgactataaagaacaatatgaagagatcattaaaaagtatgacccgcagcatgtcgtgccaagtacctttgtttttaatccttggcaagtataggaggacgaatcatggaaaattctactgtcataacgaagcttaatgatttgcttagcccttttgcggcaaaaattgggaatcagcggcaccttaaagccatctcgagcgggatgatgtttggtctcccctttatcgtgattggatcattttttctgatttttgcgaatccaccgattaacatagatcaatacaatccagcgacagccaatttttttatgaaattcatggctggttggaaggattttgcggtagctaattatgatttaatcaccgctccttacaatttgactatggggatcatcggactgatcagcgttttcgggatcgccttctcccttgccagtgaatacaagattaatccagccatgaatgggatggtggcatccgtcatttttctgatggtttgtactccggttaaagaaggaaacatcaacctgaactacctaggtacaaacgggctgttcgtggcgatcatcattggtctactcgtggtggaagtgaacagaatctttgaagtcaaaaatatcaaattaaaattgccggatactgtaccacccatggttgctaccttcattaacacgctcgttccgctattaacgaatattatcctcttttatgggattaatctgattttcttagtcacaacaaaaaagattttccccgaaacggtgatggacattttaacaccggcaacgaatatagcaggaagtcttggcggtttcttactgattgtgactctgggaaatgtattatggttgttcggtattaatggctcatcgatcattttcccaattgtttttactctggggatggcgcaaacaggactgaatgctgaacaaatgtctaacggagaaacaatgactcatctaatgaatctgcaaatgtttcgtatttcagttttaggtggtgcaggcggaaccctcggtttaattcttttgatgatgcgaagtaaagtctcagaataccgaacaatcgggaaactatcgctgatacctggcatttgttcaatcaatgaaccggtcatttttggtcttccaatcgtttttaatccgattctggcgatcccatttttaatcacaccgattgtttccttgctactgacctatttcgctcaaagtgtcggtttgattggagttggatttatcgttgatccctccttcaccccgttctttgcacaggcgtatctttcaagtatggattggcgaaatatcgtcttctgtttggtgttgatcctgattagttctgtgatctattatccattcttcaaggttatggagaataacaaaaccaagttggtggatgaatagctgtaggataaatttttttgcagaaaagttgtctactccctctaaacaaaaactcaataaaagatcgaacaccaataactcgtgttcgatcttttttgacttaattgagcctctccaaaacattcgctatctcagtcaaaacctctgagtcagtctcagtttctttcaattcctgcaacaaactaatcgtttcctctggcgctttcttcgtcagctgccccaatgcccagacagcggtacctcgaataactggtcgctgatcctgtagacaggcttggatttctggcagtgcttctttcccgccaaggttggctaaggcgatcagcgcattgcgctgcagcggttttttcccgcgccaagagccggccaggtgtccgaattgttctttgaattcgcgatttgagatggataataacggcgccaattttggatggacttcatcgacttttggctccatctcttcgtgaaaatgaaaatctttgccacgattgtatggacagacgagctgacaaatatcacagccgtatatcacgttacgcattttctttcgatattgctccggcatcattcccttggtttgagtctgataagagaggcactttttagcattcatccgaccgtctcccaataaggcacctgttggacagccggtaatacaacgtgtgcaatcgccgcaaccgtttggcactggctgatcaggttcaaattggatattcgtgataatttcaccaaggtatacaaatgatccgtattcttccgtaatcagcaagccgttgcgtccgataaaacccaggcccgcgcgttgtgcaactgccacatccaccagctcacctgtatccacctgcggagcaaagcgccacttcgcctgaacctgttccgtttcagcctgttctttgataaagttgatcaatctcgtcagccgttcttccaaaatgaagtgataatccgttccccacgaagcacgggcaaattgtccgcgtttttcatcacgagggatcttgtcgtggattttagtcggatacgccaaagcaatcgcgatgatacttttggggtcttcaaaggtttcttctggatacaaccgttctttgatattttgatgttcaaagccagaggtatgccccagcgcgcgctgctccagcaaggattcctccatataatcaaaaggatcagctgttgtaaagccgattttatcgataccaagttgcttactttcagcgatgatccgttcttttaaggtttgcattgttccactcctagtttctagttcgtatgaaggaattcatttttcaaaaaccgaaaaaatgaatccgtctctctccacgtatatcattctactagacctgctaaagcaggaagtagaactaagaatttacagggcctactatatcacatgttccccactagaaaaagaaatcaactattctgccaacggactgataggaaaatctgtccttcatttttatcaaaaactcgctttactatttaatctaaaagttaaacaaaaaagagacgccaatatccatcagccatctcgcataaaatcattcagttatttcgccctccaccactctaccctatgtaatggcagctaaatctttaccaaaaagtccttctcaaaaacgcccttcttcaacacatagccgctgccccaaatggttttgatcatttctggatcaaagcctgcgatctccagcttcatcttgatccgctttatcaagacagaagtctgggaaagatgagaattgttcggacgttcgttccaaagttgtgaacacagttcttctctggacaccacactgccctttgattggatcaggcaatccaaagttgtctgttcccgtttggtcaggcttcttttgagctggacaagattgcccatttcttggatggactcgttcttatatagaaagacaatattggtctcatccttttgatagggtgctaatttctctgaaagctgttctctcaaataatcaatgaattgatccacaaccagccaatcgatcacacctaaagagtgtaactgttcctcttccttggcattcggcttactacccaacttacgtaacaagccccatttctctgattttaaaatcggcaatagctctcgaatctcggaatccgcgattgtttcgcttaagatgatcgcttgataattcaacagataccgttgcaacgtgtcagttgtcgtattcttctgatgcctgcttgccttcaagcattccagcagctccactgaacaaaaaacctcgtaactcaggtgttgaagctgctgctgcagctcttgttcaaggactaaattcttagtcaaaatcaacataggtttcatccatggacctccttctttaatttttaaggaagtaagctctcacctacttcctcctatttctaattttctaaaaagtaattcagctgcgcttgccaatcaaggtaaagaaagatcgctgccgcaattgctaccagcatgataaacaataagccgcaatccactaataacactgtcgacttctttccatactccatgcgcaatcggctgtccttaatgaagaacaataaaaagctgatcaatccgcctaaagcaatcgcgccgaaaattcccagccatactggaatcgtcatttattatttcctcctatggcgtgtcatccaatgaccacgttaattttgccttatacactgttccctttttccctgcattggcaggcagattcaaggaaatcttgtcaaatggcatccgaagctgccacgtatcctgaccctgattcggttgagccgtgactaaagtcttcgctgttggttgtcctgccacgatcgtttccgttgattgaacactactaggcacatcaaccccagtaggcgatgaatcaatcgtttcctgcggggtatccctattcgtcactctctcaatcgacatgttatccagcttcaatgatgttcccgtaccatttggcatcggagtgttcgaactatctctgaaatcagataactttgcggtcaacttccagcctgtgctaagcccacgatcatccttgattcgggtgtagaagccatccgttacaaccttagtgtttgactgatagttcattgaatgcagatgataggtttgagcagtgctcattattggatttgtgccgtgattgaaatagacaggtacagattggatggacatatcatccgtatcctttggtgtgtaggtttgttcatcgtcttggatttgaactctgcctttagattcattatggtacgggctcgtgatcgtatcatcttcccaatctaagcgcccttcggcttctacccattgatcaactgtgccagtaactgttgtttcaaaagtaaatgtgattctatcaccatcattcaaatcaccatgattattcgtaccatcaatatccgcggcagttgctggtgcaccatttttagtaattggataggctacaattaactagacagaaaaattaaggtgtgtagactagaagaaaacataccaggaggaatttttatgtctaagagaacacgaagaactttttcacaagaattcaagcaacaaatcgtcaatctttacttagctggaaagccacgtgtagaaatcattcgagaatatgaactaacggcttcagcatttgacaaatgggtaaagcaatctaaaacgagtggttcattcaaagaaaaagataatcttacgcctgaacaaaaagaattgttagaactacataaaagaaaccagcaattagaaatggaaaatgatattttaaagcaagcagcgctgatattcggacgaagagacaagtaatcgatgcgaataagcatctttaccctatatcagcgatgtgcagaatattaggtctatcacgtcagtcctattattatcaatcaaaaccaaagaaagacgaatcagaacttgaagaagcagtcgctgaagaatttatccgcagccaaaaggcctacggctcaagaaaaataaaaaaagccttattaaaacgaggcattcagatcagccgacgaaaaattagtagaatcatgaaaaatagaggattaaaatcgagctatactgttgcttattttaaagtacatcattctacttgcaatgaagccaaaacgacaaacgtattgaatcgtaaattcttaagagacaacccattagaagcgatcgtaacagacttgacttatgtacgagtcgggaaaaaatggaattatgtctgtttcattttggatctgttcaatcgagaaattctcggctattcttgtggagaacataaagatgccgttctagtaaaaaaagcatttagccgtatcaaacaacctctgacagaggttgagatttttcatactgatcgtggaaaagagtttgatagccaagctattgatgaattattaacaacttttgacatcaatcgatcattgagtcataaaggctgtccttttgataatgccgtagctgaatcaacttataagtcgctgaaagtagaatttgtctgtcaatacacatttgaaaccttacaacaattggatttggagttatttgactatgtcaattggtggaaccaccttcggttgcacggtacacttggctacgagacaccggttggttaccgtaaccagagattggcgcagcgaatccttgataatgagctcggatgtgctaacgctagcgaggcagtctaactttaactgttagctcctgccgaagatcgtcacatccgaggaggctcattgtcaaggacaatcggaatagcatacggaaagaagttctgcaccttataaaatttgtcaaaaaaactgttgccattccaactataatatctagtgttggtgacgccttctgttgccaatactttttcttttttctaataaacgcaaacagacaccttgaaatcctttagaataaagtcgacgaaaaccattcaaaggagtgtttcaagatgtcctattcagagtttaccaaagagttactagatattctagacctaaatcttacctttcatgaagatgcctttcgcaaagagcgcattaatgacgaaacatgttttgtttttgatggcacattgagctatcaaccagaggaatgcttccattgccactatcaaaataagcaaacgatcattaaatggggctggaaaaaagtatccatcttattgaatgatgtcagtaactacaagaccattcttcggattaacaaacagcgcttcaaatataaacactgtggaaagacttttttagcagaagattcagttagtgatcgtcgctgctccattgcccgcagagtcaaacaagccattcttgagctattaagtgagcctatttctatgtctttgattgcacgtatgaagcacatttctccgaccactgtcattcgaatacttcgcagccttcggcctaaaaccgtttctttgaaccagccgttaccagaagtggtgtgtttcgatgaattcaaatcggtgaaaaacgtctcgggagccatgagctttgtcatgatggacggcaaaacccatcaactgattgatattgtggaaaatcggcaacttgatcctttacgcgactatttcttgcgctaccctataaaagtccgtgaacaagtgcgtctagtggtttcagatttctatacaccctatcgcacattggtgaaagagtgttttccgaatgccagaatcgtcgccgatcgctttcatattagccaacacattggtcgggcttttaccaaccaccgaattcaagtaatgaagacctttaaaaaaggagatcgtcggtcgaagcacttaaagaaatactggagactacttcaaaagaatgcgtgggaattgaaaggtcagcatcgctactggcgtccgtcatttcgagatcatctgacagaagcagagatagtcgatcggctattatcttatgatgattccttaaagcgaggctacgaagtctaccaggattttctttccgttatcagaagacaagatgttcctgaattcgtcgcgctcctaaaagaagactacaaggagttgccagagcactaccaaccagtgttcacgaccttcaagaaataccaaacagaaatcaaacgagcgttgcgcgttccctattccaacggccctatagaatgtttgaataaccatatcaaaggactaaaacgaattgcctatggctttagaaactttcaaaactaccgagaacgaatctttttatatcgaggaaaatattttaagaaaactaagaatactacccaactgactaaagccagaacaacaacatggctagacaagatagctgtctagccgtgtgagtatctcgattattcgtaaatgcctaataactcggtacctataaagcctttccacctccatctatacttaagttatcaagtgaaacggaggtggttctttgaaaaacacaaatgacatcgttcctattcaacttcacgatcaagcaagaacggctcgtgatcagaaaaagaacagtaccgcaaaaattgccctgcgtatccgtcagaaagatggttctgaagtcttgatctataatggcgtaaacagctacatcctctcggcgattcttaaggagttgggataagatgtttctcgattttaccaaagtagaaaaaatctttctcgtaaccggtaagaccgatcttcgtaaaggaattgacggactcgccaggattatccaacaagactatgagttgaatgtttacgaggatgccatttttcttttttgcggcaatcgatgtgaccgatttaaactactctactggcataacgatggcttctttctcgggtataaacgaatcgaaaacggccggctccaatggccgagaaaaaaggaagaggttcgccaactgtctgtgcaacagattcactggctacttgaggggttaagcattcaccaacccaaagcaattaaggccgggacaaaaggtttcttttgaacagagaaaatccgcggaatcattgattttatgcggttttctctgtttttcgatgcgtctaaatggtataataataacagtagtaataatcagaatggtggtgaatttcttgtccttacacacaaattctacttctaacaataacgtcgaagtagatgtgactatcctgcttcaactccttgaatctcagacagaaacgatcaaagaactccagcgcgcgaatcaagcattgaaccaagaggttcatcttctcaatgaaaaattgagctactttacggatcgtttttttggtcgttccaaagaaacactggattcacaagtgactggtcagttaaatctatttcctgatgaggttgaagagagtaaggccgtccctaaaacagaagaaggacaagaaacaacagtaaaaggacacaaaagaaaaatcggtcaaaaagcagcgaagatcgcccatcttcccttaaaagaaagacaccatgaattgtcaaaggagcaacgaatctgtgaccaatgcggcactcaaatgacagacattggcacaaccaaaattcgcgaagaagtgcttttccaccaagccatgttggatcggctcgttcatttacaacatacgtattgttgcaaagaatgcgaaaaggcagatatttcttcctataaaaaagcccttgttccacgacctgtcgtctccaatagtttaggatcaaacagtgtgattgccgaaactatccgattgaagtttggacaaaaagtacctgccaatcggcaggaaagctattggcaagaaacactgggtctggatatttcacgtgataacatcaccaactggcatatcaaagtttgtcataacgccttagacagtttagcccaacgattaaagagccatttaacccaagaggaaatccttcacgccgatgaaacaacgtatcgggtcattgagaagggcaagaaagacacgcattattggctattcagtacaggaaaacatagcacacagccaatcgtgtattatcatcacgcccaatcgcgagctggcgaagtgccgaagcaatttctagcagacttcaacgggtatctgcattgtgatggctacgcaggttataacgcggtagaagatgtcacgctcgtttattgtttggctcatgctcgtcggaagttttttgaagcccttccaaagaacaataaaaacgaggaaattcctgcttggatcgcggtaaaaatgatcgatgtttggttccaattggaacgagagtgggtcgacttatccgctgaagatcggctgaaaaaacgccaggactatttaaatcctctattcatcaatttctatgaatggttgggctcctttacagcagttccgaaatcaaaactagataaagcggtcaagtatgcgttgaaattgcgtgaaggatttgagcggatttttgaggatggacgattggaactcagtaataacttagccgagcgccaaattaaagagctagtgatcggccgtaaaaattccatgcattcatgtagtttggaaggtgcacgaacttcggggattatcctaagcgtgtatcgaacagccgaagcaaatgagctaaatccagtagcctatttggaatttctatttgatcgtattccaaatctagcgcatgtttctaatgaagcgttggatgaacttttgccttggcgccctctagcacaagcagaatgtggtaaacagtacgcaaaaacaaccaaataacttaagtccattatagggcttaggttatttggtgtgtaggtacttggtgattaggcacttacgacgaagagcccaaaaaacttaaaaaccttgcgatgtaagactggcacggagaagaccaatctatcatcacaaggtaagagtattcaaatcttattgaagactcaaataataacaaattttaattaaggatagtaatatcatagatttttctagaagtttcttgaggtgaaattttcattacctgtcttttatcttctaagaaattaccttcttcaagtgaagtggagagaccactccaaggttccaaagcaatgaatggacttttattagttgtagaccacagaatcaagttcggaaaatcatcaaaatctactcgaagacctttaccagacttccttgaccgaagcgttacgctacgagacttgagctggtcaagtgtaatggcatcatgggaaaaaagtgagtagtccaaatcgagaatcttttgattttccaaaaaaggtgtccgatcttgcaaatctaataatcctgtctcaggaaaactctttggtatcgagcaagactcaacctcactaaattcaatataataatcctcatagttttcaccttctactaaaggacaattgaatgctggatgggctccaataaagtaaggcattgttttttccatttccaagttcgttacctgaaattcggttctaattgatttaccattcaaggtataaacaactctcagttcaaactgatataggtaattatcaagcatctcagcatttggtttaatactaaaggtcacgctattatcattgacttcttccagaataaattcttcttttcgaacaaaaccatgtctacgaataagacctgtaaaaaagggtctttcttgaggtctataaatagcccaatcatttcgtaaactaccacagataggaaatagaataggcgcctgtccattccaataatttggatcagcttgccagagatactctatcccatccttgtctttaatcgaagtcagttgaccaccaagtgttttaaactgaacagtaagatactcgttttttaattcgatagtcacaactaattcctttctttttattattggaaaggcaaataatttacctcgaagtgaatagtctcacgtatttctacatcgagtgattgtaaaaattcccattcaaatgctgataaccctaaatcagaatggcaaatccactcttttccagttgaaacataccatttaccacattttagcaacggggtagcttcaagctcaggaatcatagaacaatcttcgaaactaacaatatataccttttcaaagcctggtctaaataagtgttgtactttttctaaagtatcggataacaattttttacattttcaagtaatattactctatcacttgagtttctgctactttcttataccaatgagctgatttcttaggatagcgttcttgcgtgtcaaagtctacatagaatagtccataacgtttttcgtatccgtttgaccatgagaagacatccataagtgaccagatgaagtaacctttaacatttgcaccatccgcaattgcgtctgataaaacttccaagtgtttcttcacgtaatcaatacgaccatcatcataaacggtattatctacaaactcatctttgtatccaagaccgttttcagtgatgtaaatcttcttatagtttggataatcatttttcactcgcatgatttggtcatacaagccttcaggataaataatccagtcccaatccgttctaggcacataatctggtgcgattcggcgaccaacacctttaatctggtacttagaacttcctttttcacccttaccattgtgaatgatttcagtctcaccatcaaaggcttgcatccaatcactcatgtagtagttgataccaaggaaatcgttcaaatctttagctgcttcaagtgcttggaagtcttcatcacgaagatcaagttctccaccattttcagctaggatgtggttgaccccttccatcgttttatctgaatagtgtccaaggtaggttgcatccaagataaatttgttatggatgatatcttctaactcagcggcacgaacatctgctggattttctggatcataagggtatttggttggcaacgcatgtactacaccaatttcgcctttataacctttatctttatacaatttcacagcacgtgcatgagaaaccatcatattgtggtgtgattggaagactttggcaagatcatattgaatgcctggagggaatttaccaaccaagtattgaccatctccaattgggccaatttcattgaaagttgtccagtagtttacttctgggaactcttcaaaacagaaagcggcataatctacaaagtgttctatattttcgcggtttaagaaatctccatctgagtgaagaacttctggtgtgtcaaagtggtgcaaagtcacgaatggctcaacatgacgtttgtggcactcggcaaaaagattatggtagaattcaacacctttttcatttacttcgccatagccagttgggaaaatacgagaccaggcaattgaaatacgaataccattaacgccatatttttcagctaattctaaatcaacaggatatttatggtaaaaatcacttgcaggctctgctgtgtaccaataattgtcttcaagatacttatcccatgcaactgggcctttaccatccgtgtgagtcgcaccttctgcttgataagcagctgtagcaccaccaaaaataaaatctttaggaagtgttttagtcataactataaatcctttcaaaaaaagcatttgagacgatattctgagttccggaaaccaaggaaatgaaatgaaatgcaatgatatggttaacaatattataaggaactgaaagaataatctcgtctcaaataacttttacaaatttattaatcaaactgttgttgaacaaatgcaagagcaccttgtccatcacgtgtcaatttgatatattgagctccttcagtttttgcaagtttaatgcccaatttatctgtttcagccttcatatcatcgaagtttgaagcgacctgtggagccaagataaccaagtcaaactctggcaacatttcacggtgagcaccataaccacccgctgccgctttgactggaacattgtattctgctgctgctttgttcaaggcattggcaagcaagccacttgtacctccacctgcacaaagaacaaggacattagtttcttttgtgatattattgtttgctgctacatcttctttagcaacgcctgcttttccaagaacggcatctgctttagcagtattgaagtttgcagctactttttctttaagagcatcgtttgttttaccagaacgttcttcttcaagaatttgttcatcgtataccttaacaaatgggtaataaatgatagtatcaacaactaccaagagtccggctaagataaatgatagaacttggaagttagtaccgagtacaattcccaacggaccaggagtaacccatggaaggttggcagagaatgagttcatgttcaatgtgtcaacaaagaatttaaagatccaaacgttgacaatcggagcgaaaatgaacggtacaaagaaaatcggattcaatacgattggtgcaccaaataagattggctcattaaccccaaagaatgttggaacaactgaggcacgtccgatggcacggttacgttctgatttacaaatccacatgaacaagaatggaacaatcaatgtagctcctgttccacccatggtaacaataaacatttgagtaccagaagtgataactttatctgcatgttgtccagcttggataagatgcaagttgacatcgatattggcataagtgatagcagcgattgctggttcgacaattgaaggaccgtggataccaacaaaccagaagaaggcataagcaccaaagataagtgtaattccaaggtaaccatctgcagctgagaagagaggagcaagaagggtaccgattgattctgcaacggttacaccaagagttcccttaacaatgagttcaagtccataaaggagaacaaccgatacagtgaatggaatcaagtctttaaatacttgagagatatttggtggaacctcttcaggcatacgaatagtaacattatttttcacacaggccttgtaaacattaactgtcacaaaggctgcaataaatgctgtcaaaagaccttttgttcccatgaaggctgtcaagaagcctccttcttttgcaggctcagctaccatcaaaaggaaccctaccatagacgctagcatcgtagataagaagttaatctgattggtcgcaggtaggtcacggttcattgagtccgtcaaagctttagcggtagtaccaccaacaaagaatgctaggatacccatcgaatagctataaggagtcatcaagaaggtctcaatgtcttttgaccagtggaatccccaagcatttgggacataggcaataaggataaagatagatgagaaaaggatgactggcataccagcgataaatccatcacgaatagcacgaagatagatgtttcgagagattttctcaaagaacggtttccctttctcaataagttcaatgagtttatgcattattttgctcctcttttataaagttcgatgaggtgatgaatcacatcttttaataagacagtagtcattaagtggtcctgaccatgcatcatggtaacgctgtatggaagttcctccccagaagcttctcgagccaacatagctgtctgagaattgtgagcctctgcaatacagcttcctgcttctactacaagactatctgccttagcgaaatcaccattttcagccgctttaagcgcttctaaaagtttagagcgagcatctccagcataagcaacaatttcaaaccctaagagagtcatctcttctctgttcataacaatatcctccgttttatgtttttactatactttatcagtccatggactagctgttttaacaagaactttgttaagttcatcaatattttcgaatccagtagtacgcaaccattcacgtgctgctttttcaccttctttgatgtaaggttctacagatcctgcccaagtagcacgtccacaaagcacaccattaaacttggcacctgagtcgtgagcaaattgcaatgtttcttggaacaatttagcagatacacctgcacttaggtagatgtatggaaggttagtcgcttcttcttgtgctttaaagaagtcagcagcttcagctttactgtaaaccacttcaccatcagcaaaaccttcgacatatttaacgttaactggtacttctactttaagaacatcaatgttaaagcgtggatcagagaaaactttcatcgcttcaatgactttgcgaggtttcacttttgcatattcaacagaacctgcatctgagatttcttcatcataagcaaggatttccaagaagaaaggaatatcttcagcgacacattcagaaccaacacgttcaatataagcttgtttttgttggttaagttcatctgagctgtctacatcatagtaaagcaagaacttaacggcatcagcgccttgctctttgatacgttttgcagaccaaacatccaagcagtcaggcaaacgttttgtacttgatgtatcataacctgttttttcataggcaagaagaagacctgcttctttatccaatgcttttgttgctggaagtccatattcagggtcaagcaacattgaagaagcgtattttgtaagttcatcagcaaccaaaacctttagttcttccatttgagctacagttggttctgtatcttgatactgtgccatcaaacgtttcaaagcaccacgttggtcaaatgccaaagctgagataacaccgtttttatctgaaattttttccaaagatttgcgtttctgttctgtaagtaccatttttatacctcttttactccaatttgtgagtttagtgtttcgtaattagtcatattcacatgccctgtcattgtttcttgagcatttaacatacccaatgtcatcgcatgttttaataagtcagcgtcactttttttactatttaaagctgatgcaataccagctaccgttgagtcccctgatccgactggattaacaactgggatatcaggaatatctaccttatagaaaacatcaccatgttttgcaaaggcaccgtttcgacctaatgagaccactatccattcgataccactaaaaagtgactctttaagaacgtctttgagttcttcaatatcttttgttacttcttttccaagcaactgtgaaagttcctcattattaggtttgatggcagtaggtttagccgacgattttagaactgtttcaagaggtgcacctgaacaatccaaaacgactgctactccttcatccgaagcaagttggataagtttttcataataatcgttgggaagtcctgaaggtaaacttcctgaaattgtcacaacttctgattgtttaataagattgctatagtggtcaagaaagccttctgcttcttcatgagaaattgttggtccttgttccaaaatttctgtttggttaccctcgtgtaagatagcaatacagtttctagtgtttcctgagattttataaaaagctggactaacaggagattgttctaattcgctttcaataaattcaccaattttaccacctaagaaacctgtagcagtaactttatcaccagattcatacaagactctagtaacatttaagccttttccaccagctgtcttactaacatctttcaccctattcactgtatcaattttcaatgtttctagaggataagagatgtctactgaaggatttagtgtgactgtcagaatcatttgttataccttaatcgtggtagtcaccacggtcccatctttcaagaaattctgtaaagaaatcttcatctgcttgatgtgcattatgtgtttcaacgtgttcgatttttgcaatcaattttttattttcttctgttggtttgtactcagcttcaatgaaagcttcaatgatgtcattcataagaagaccaccagtaatcattccaccgaaaccgataacattcgcatttaactcttcttttgcatatatagctgatgtcatatcacgaaccaacgctgagcgaacacctggaactttattgactgcattgttaatgccgacacctgtaccacagatacatactcccaagtctgcttgaccacttactactgcttcaccgacttttttaccatagatagggtagtgagtacgtgcgtggtcatatgtcccgaaatcaaggacctcatgtccttttgatttcaagaattctgatactgccattttttcatctgtgacaatgtggtcacatccaattgcgattctcattccttaactccttttcttaacacatcttgttaagcatatctactcggatttgatgacgtccgccatcatatttaccattgacgaaacctttagcgatgtttttagcaagctcatcaccgacgatttcagcgccaaccgtaatcattcgtgaattgttatgtccacgtgtcatataagctgagcgttcatctgaaacttctgctgcaaccatacctttaattttagttgctaccatgaatggaccagctccataagcatcaattacaatacctaagttttgctcatctttatttacttcagaggcaactgccaaggtaacatcaacaaaatcttgtccgtccttagtcacatcaattacctcaaaaccttcttctacaagaaaatttttcacaacatcttttaatctcgtacctttgagatctgcaccaacaacaatagccattttgaccacctcctaaattttagaaagaaatgctacgtagaagtagaaaacattttgcaaaatgttcgaaaaaacgttttcaccatttctttgtttatataatatcaaacattcaaacaaaaagcaacgcttttttgtttattttttgtttatttaaaaaatagataacaccgttaaattattgttcatttaatccatcacaaaatggacgtgaaatatctattcaagtattacaaaagtcttttactttctataacttactgattaagaggtcctactttattttcgtcttatacaaaatctgacctaagctaatatacgtcaatcctctgttcttatttcatcatctaacatttgtttttgtttgaaattgtttgttttaccttgaaaatattgtcttttatgatacaattaaaagagaattatctttggaaaaaaattactttatgaaagaagagtcttcatatgaacaaaaaacgacgattagaaaaaattttagatatgttaaagattgatgggaccataaccataaaagaaataatagatgaactagatatttccgatatgacagcccgtagagaccttgatgctctagaagctgatggacttttaacacgtactcatggtggtgcacaattgctttcctctaaaaagccacttgaaaagacacatatcgagaagaaaagtctaaatacaaaagaaaaaattgacattgctaaaaaagcctgctctttaatcaaagatggcgatactatttttattggacccggaactacacttgaacaactggcattagaattgaaaggtcgtaaaggttataaaattcgtgtcattacaaatagtctccctgtgttcttgattctaaatgatagcgaaaccattgatttattgcttcttggcggtgaatatagagaaataactggagcttttgtaggttcaatggcttcgacaaatttaaaagcaatgagatttgccaaagcttttgttagtgcaaatgctgttacccataattctattgctacatatagtgacaaggaaggtgtgattcaacaacttgccctaaacaatgctgtagaaaaattcttattagtagacagtactaaattcgatcgatacgatttctttaacttctataatctagatcaactcgataccatcattacagataaccagattagccctcaacacttagaggaatttagccagtacactactattttaaaagcggactagaattatgacttataaaaatattgtttttgaccttgatgacactctttatgaccatcaactcccctttaaacgtagcgttgagaaatgttttccaacgattgatatccaacaaatagataacatttacaaacgtttcagatattggtctgatgttgcttttcctaaatacacgaaaaaactcatcagtattgagcagcttagaatttttcgctgtcagaagactatggaagaatttggcatcgatagtatttctaggacagaagctctagacttccaagctgactatgaatatgaactcgatcagattacgatgattcctgagatacatcaactactgctggctctacataaaaaccacatcccaataggtattctaactaatggccctgttgacttacagagtcgaaaactccaaaatattggtgcctatcaatattttgaaaagcaaaatatcatcattagtcaggccactcacggaggagctgcagaaaatagctatgaaggtaatgtaaaaaacttacaaagttaccgaaatgtccaattatctaaaagggctatagaaattcttaaagaggaaattgagttaaatcaccaacacataagattcaatcctgattataaagataatggatggatttttacttccaaaagtcgtcataaacccgactataatggaacacctcttcattatagtgtccttaacaatttcctcaactcacctgaaaatggaaaattaaatcgaaaaggtaatccaaaacgagcaggaattgatattgataataaacttagttttaataaacatattacgacccatatattccgtcatacgcatattagtttcttagcagagcaaggaatacccctagaagcaattcaagaccgtgtagggcattctagaggtaatcgtgtaacagaaatttatttgcacatcactaaaaaaacaaaggatcaaattatacctatccttgatactcttacacaataagtgtggcaaatctgtggcaaaacataagaaaaaggcttgtccatattggacaaaccctttattttcaagcttatataacctaattaagctttaccagctgattagaataggatgttgcatgttttactacgtctttttcatagagtttcactaattcgtcaaaatttgggtgctgttgtttgaacgtatcattatcaatgataacaacatttccttgtgtttcttcggaaattgccgatcgcaaactagttttccctgatcctggttgcccaccaagtaaaaaagcggttggcgattcaaccgctagtctatttttagttagtcgttcaacattcttttctaaacgatcttcaaattgcttttcggtgaagtcagtaatattcgccatgttaagccactttctcttttgtcaaaatttgttttgaatattgattcattgaccgccaatactcatgaatagcttgtaattcttctgtaaagggccacgataaaatgtaggaaaaaggccatcgaaaatgtaggctgaattcaaatctgataatctttttcatgaaaacattcaaggagagtgaatcatgagaaaagatgtcttagaaggagtcctacgccacattatgaacgatattcaaccaaattacgcagctttggctaaacaatacaattgtgattacagaactgttaaacgctattacgaagctggtagaaaaggaaatatagaccagctaaaaaaaagaaagtcttcaagttctcctttactttctggatttgaagagattattagagataaattggagttgagctgttctgcttcttctatttattactttattaaaaaaatgggttacacaggtggttatactaccgtcaaacgatattgtcgtcactatcgtgacgaacgggtgaaaaaagcaacgattcggattgaaacaactcctggtctttcagctcaagttgactggaaggaaaacatcaagatggtgagtaaatatggcgaagtgttctactttaatattttcctatacgtcttgggttattcacgcatgaaatatttagaagtgacctttgatagaacgcagtccactgtgttccattgcttagtaaatgcgtttgagtactgtggaaacggtgttcctcaagaaatatggtttgataatatgaaaaccgtggttgatcgaggaaaaagtcaatttagtcaaactgtttttaacgagaaattccgacaatttgcgaaagatgcgcgattcaatcctattgcttgtcgcccatttagaccacaaactaaaggaaaggtagaagcattagctcgaacggtcaatcgattaatggttttcaattatgaatttgaaaacgaacaagatcttagaagaattgtaaatgagtttatggacgatttaaacaatgaacgttctcaagccgtaaatgccaaaccaatcaaattgctcaatgatgaaaaagctattctaattcctttaaatcgtttggaactcttacgttatgtttccagaaacctacatgtaaaaagaaaagtttccattgaatccatggttcaatatcaaaattcaaaatattctgttcccttgaaatatattggcaaagaagtgactctggatgtccggaaggacaaccttttcatctggtatgggcatcaatgtattcgttcgcatccattaagtgaaaaagcgttgaattatcaacgggatgattcgcttgaaattcttcggtctgacgtcttcaaatatttggaagatgaagaactagagcggtttgtagaggaaaatttagatgcttatgatgaattataaggaggaacttatgtcaaattaccatcagttattgaaccagttaacagatttaaatcttacgtgtgtcaaagaaaatttacctgcacatttagatgaggtagccaaaagtgataaatctcttgtcgattctttatttgaattgacgtctcaagaaattagttatcgaaaagctgaaacccaaagaaaaatcttgaaacgtgcaatgtttccttatcataaacgtctctatgattttaattttgatttccaaccaaaaattaaaaaaagtgaaatccaagatttagtaactttgcgcttcttagatacctatgacaatattcttttcatcggaaatagcggtgtagggaaaacgcacttagctgtttctattggtttagagtgtatagatagagggttaagttgcttatttatcaccagtacagagctcgtcaatcggctcattcgagcacataagcgtggaacaagtgatactatgcttaagaaatatgcaggatacgctgtattaattattgatgaagttggctacttaccattttcaaaagaaggatccaatttactatttcaattaatcaatatgcgttatgagaggaaatcgacaattattactacaaatattccgctttctcaatggtcggaaatatttggaaataagaaattaacaaatgctttattggaccgcttggtccatcactctaaaatcattcaaattacagggccttcttatagaatgaaaagctatagcgaagacaaagcgaaagaaaacaaataatacagaagaccgaatacctacattttcaatggcccaaaaccaacatttttttgtgacccttgacaggtagatgtcaatcgtaagtgcctaatcaccaagtacctacacaccaaataacctaagccctataatggacttaagttatttggttgtttttgcgtactgtttaccacattctgcttgtgctagagggcgccaaggcaaaagttcatccaacgcttcattagaaacatgcgctagatttggaatacgatcaaatagaaattccaaataggctactggatttagctcatttgcttcggctgttcgatacacgcttaggataatccccgaagttcgtgcaccttccaaactacatgaatgcatggaatttttacggccgatcactagctctttaatttggcgctcggctaagttattactgagttccaatcgtccatcctcaaaaatccgctcaaatccttcacgcaatttcaacgcatacttgaccgctttatctagttttgatttcggaactgctgtaaaggagcccaaccattcatagaaattgatgaatagaggatttaaatagtcctggcgttttttcagccgatcttcagcggataagtcgacccactctcgttccaattggaaccaaacatcgatcatttttaccgcgatccaagcaggaatttcctcgtttttattgttctttggaagggcttcaaaaaacttccgacgagcatgagccaaacaataaacgagcgtgacatcttctaccgcgttataacctgcgtagccatcacaatgcagatacccgttgaagtctgctagaaattgcttcggcacttcgccagctcgcgattgggcgtgatgataatacacgattggctgtgtgctatgttttcctgtactgaatagccaataatgcgtgtctttcttgcccttctcaatgacccgatacgttgtttcatcggcgtgaaggatttcctcttgggttaaatggctctttaatcgttgggctaaactgtctaaggcgttatgacaaactttgatatgccagttggtgatgttatcacgtgaaatatccagacccagtgtttcttgccaatagctttcctgccgattggcaggtactttttgtccaaacttcaatcggatagtttcggcaatcacactgtttgatcctaaactattggagacgacaggtcgtggaacaagggcttttttatagcttgaatttacactttaagtgcaacacataaaaaatgactcataatcaatatccaactagaataggtttgtcgagaacactactaggaggaagataattatgagccagtatcatcatcttaccatactcgaacgagaaagaatctttctacttcacgaagaaggtgtttctattagaaaaattggaaatgacattcatcgtagcccgtctaccatttcacgtgaactgagaagaaacaaggagaaaacctactccccttccaaagcagacaaaaagtatgcttctcgaagaaaaaactgcggacgtcataaccttctaaaagatccgcgaatttggtcaatcgttcgtcatttatttgtcgattttcaatggtcgccagaagaaatttctaaccgcttgaagttcgaacatgcggatttctccatcagttttatcacgatctaccgtgccatttacaacggtattttcgatacagaaccgctctcccatggcaatagaggactgatccgttcattacgtcatcgaggaaaaacaaggcatacaaaaaatcacgtcgagactcgtggaaaaatacgcattacgcattcgatccatgaccgtccaaaatccgcagacgatagaagtgagtttggccattgggaagccgatactgtagctggaaaaactggtggtgcttgtttagtgacgttgacagatcgaaaatcgcgattccttttagcaggaaaagcgccgagaaagaaagctgcttacgtgagcgaaaaaatgattgaacttttaagcagtatccccaatgaggtggttaaaacgatcactccagatagaggaaaagaattctccaatcatttcgcggttacagaagcattgaataatgtgcccttttattttccagatccgcatgccccatggcaacgaggaacaaatgaaaatacgaatggtcttattcgagaatacttaccaaaatcgaaagagatggacacggtagatgacacaacgatttatcggatggttgaaaaactaaatagcagacctagaaagtgtctaggttggaaaacaccttatgaagtcttctttaataaagtgttgcacttgatttgacaattcaagaggaagaaatatctgccttttcgcattctttgcaacaatacgtatgttgtaaatgaacgagccgatccaacatggcttggtggaaaagcacttcttcgcgaattttggttgtgccaatgtctgtcatttgagtgccgcattggtcacagattcgttgctcctttgacaattcatggtgtctttcttttaagggaagatgggcgatcttcgctgctttttgaccgatttttcttttgtgtccttttactgttgtttcttgtccttcttctgttttagggacggccttactctcttcaacctcatcaggaaatagatttaactgaccagtcacttgtgaatccagtgtttctttggaacgaccaaaaaaacgatccgtaaagtagctcaatttttcattgagaagatgaacctcttggttcaatgcttgattcgcgcgctggagttctttgatcgtttctgtctgagattcaaggagttgaagcaggatagtcacatctacttcgacgttattgttagaagtagaatttgtgtgtaaggacaagaaattcaccaccattctgattattactactgttattattataccatttagacgcatcgaaaaacagagaaaaccgcataaaatcaatgattccgcggattttctctgttcaaaagaaaccttttgtcccggccttaattgctttgggttggtgaatgcttaacccctcaagtagccagtgaatctgttgcacagacagttggcgaacctcttccttttttctcggccattggagccggccgttttcgattcgtttatacccgagaaagaagccatcgttatgccagtagagtagtttaaatcggtcacatcgattgccgcaaaaaagaaaaatggcatcctcgtaaacattcaactcatagtcttgttggataatcctggcgagtccgtcaattcctttacgaagatcggtcttaccggttacgagaaagattttttctactttggtaaaatcgagaaacatcttatcccaactccttaagaatcgccgagaggatgtagctgtttacgccattatagatcaagacttcagaaccatctttctgacggatacgcagggcaatttttgcggtactgttctttttctgatcacgagccgttcttgcttgatcgtgaagttgaataggaacgatgtcatttgtgtttttcaaagaaccacctccgtttcacttgataacttaagtatagatggaggtggaaaggctttataggtaccgagttattaggcatttactgtcaatccgcggcgtttcgtgattcgaccgattcggcgccgactgagttgaagcccacgctttgctaaacacttcttcaattttcgggtaccgtaagcctttcggtttcgaataaactcttcctgaacgatctcttctaagtcggactcattttcgatcggtttcgcttgataatagtaggtttgacgagaaatatttagaattttgcacatcgctgatatggaatatttatgcttgttggcatcaattacttgtcttttcgtccgaatatcagcgccgcttgctttaaaatatcattctccatttcgagttgcttatttttctttcttagtgcgatcaattctgcttgttctggtgttaagttgtctctttctttgaatgagcccgttgattgtgcttgcttcatccatttatcgaaagaagaaggcgtaagctcatactctcgaataatttctgcgcgaggcttaccagcgagatagagatcgacgatttgttgtttgaattcttttgaataggttcttcgttgacgtcttgacatgaaaaatcctcccgtgtgttttttattattctacacaccttattttttctgtctagtctagtgtagccgattcaatagcagtacctactccccctaatcctaagaaaaacagtaaaagtaaatacaaaaatagcatcatattatatgtacggaggcatttcatttacacaagattcttgacgctacccatattactcaatagattaatatcaaatggtgaaaatcaacgaaaaaaggagatctatcaagcaatctccttcccaataaatctcctcttatataaagttatttatgaacactgatttaagctaagctgccgatatcacaatctcatcatccactaaatcagccttcaagtttttgacatctaagtggtcaaggtaaaaatccgttaccttatcacgaatttgttgttcaattactcgccgtaacggccgcgcacccattgcttcatcatagccttgttccatcagccaatctttggccgctttagttacctcgagtttgatggattttttggctaaagttttttgtacatccgacaacattaaatcgacaatttgacttaagtcttgcttagtcagatgtgaaaattccacgattccattaaaacggttcagaaattctgggcggaaaaatggtgctaacttatccattaatgactgatctcgttgctcgtcaccacttaatgattcattaccaaagccagcattagaagtagcaataataatcgtatttttgaaattaatgacattgccttgtccatccgttaagcgcccatcatccatcacttgtaacagtaacgttaatacttgtggatcagccttttcaatttcatctaataatacaatggaatatggattacgccgaacccgttcagttagagtattagcattatcttcatagcctacgtatccagccgaggtaccaattaatttcgacacagctgtacgatcagcatattcactcatatctagccgaataatcgcattttcatttccaaacatatctaaggctaattgcttagctaattcagtctttcctacgccagttgggcccacaaacagaaaacttccaatcggctgatcaccctctgaaaagcccgcacggttacgccgaattgcttttgctaccatttcaaccgcttcatcttgaccaattaccttacttttcagacgcttatcaagatttttcaagcgctcaatatcattagcgcccatatcagaaactggtataccagttaaacgttcaaccgattgtgccacatcatcaatcgtggcagtgattttttctttttgatccgtttctttaattttttgcttggtttcctcgatcgacttcttgatatcagcggcttttgtaaagtcctccgctttaatggcggcctccttagctgcctctaattttttaaggcgttgatccaatgtctcaacatcagtttgcgaatttttagccgctaaatgagccgcagtcatgtcgatcaaatcgatagctttatctggcaaagtgcgttgtggtatatattggattgaataatccacagccgccttcaaaacatcatctggtaatacaacatgatgatgtttttcgtacagctctttaacaccttgtaatatacgtaaagtgtcagcggccgtcggttcattaatcacaacatcattgaatcgccgtgccaaagccgcatttttcaaaatagtattgcgatattcatcttgagtcgtagccccgattacactcagctcgccacgtgacaaagcaggtttaatgatatcagccaatcctttgccaccatcttcaccaccagtggcacccgtgccgagaatctgatgaatttcatcgaagaatagaataatattaccagctgctttaacttcctctaccagctgtttaatattttcttcaaaagaaccgcgatattgagttcccgcttccaaagacgataaatcaatcgaatagatttctttatcttgaatcgtttctggaactttaccagccacaattgcttgtgccagaccttcgacgactgcagttttacctacaccggcatcaccaactaagattgcattatttttcgttctacgactcaaaatttctgcagtttcttgaatctcattctcacgtccaatcactggatctagtaagccatcacgagcctgttccgtcaaattagtccctaacttttctaaaatccctccttttttaacagcctgtttaccatctttagatacttctattgttttattattttggggtagcttaccagttgctcggtattgagtaaactcatccggtgtcaacgattgtccattaactaaataccgtgcacgctccgaattttgattatccatgcgccgaaataattgattgaaaacatcatccatatcattgttgaaaaaaggatcatttccgtaaaaatttgccatattacaacacctccataaaaatttatatgtgtaacttagtgaccataatatcctttaagttataacttaattgtatcacaatttttatgtatcgctaagtaaagtgactatagaatcaattagaaataattaggataattttgtttaaacaaatgagaaatcactttcataaaatgaattgatttccctacaaggttccctatttaatagcccttgataaagaacttgaattaacaagttactttccagaccaattttaatttaagagactaatactcatacgcgtggtgctagttaaatttagacagtaaaaaatcctgacggtttacacttagagcaatctatagtaaagaagtgttaagcgtatcagactaagactttgctttttcgtgggcttcgattgccagaacgacctttgaaacttcgttcaattcattacctcatttcttttattatttatgatacggattaaagcctactctttgcccaaaaaaatattgttaataggaactcgatacagattagacagctcatttaaaagagaaaatggaatatcagaactatctttttcatatttggacaacgtttgaaaatgcacatcagcagctttagcggcttctttgctagtgaatccagcattaacgcgcgctgcctttaacgacatagcagattattttggcgtattgaagtctacgattgatccgcggtatggcgagataccgaaaaatttaatacctgttaaaaaatatagacagattcctgttttgggagaaattgcttgtggagatcctattttagctgaagaaaatatttaagaatatagaaaagagatagacgaaaacttgcccactggtaaagtcttttatttaaaaaccaaaggtaatagcatggttcctacaatcccttctgatagttacgtgttgattcgaagacaaccagttgtggaagatggagaaattgcagcagttatagtaaacggcgacactgaagcgactctcaaaagagttaaacatgttaatgatgttgtgatgctaatgcccgataataatgattatcatccttatatcattgatgaaaataatccagcaagaattttgggtaaagcggtaaaagtaagttttaacctataaaaaataccccagtcgcagttggagctgcggctagggttctcatttctgagactgtgtatattattatatcagagatggggatgaaaaatgaaaaatattgtacgaatattattactttcaataggcgcttttcttgtatactaaagtctttttgaatccgtctgattacttcattcaaatgttctttgtttgttaaaaagtgtgacacatcttccgttgttagttgataaatcaccttattcattttcgttgtcctcctttttcatggtttaataggcgccatatttattgatattttcaaaataatctaaccattcacttgaaacagtcttggcttttttcgtttcgacaaatttcgcatacgttagttctaaagcttgatattcagaaggtttaatagtgcttggtttgacacctacttccaagcatagtaaggcttggaaaaaccattttgcattttgctttttcagttcttccagtgttcgatagtacgtcgcaatgagattcatttcgacacctgattcaatcatttcttccatagctactgacaatttttctttataatgtttttttggaacacgtgtttcgttgtataggaacgtcatatcctccattttttgtgccattttatccaaaggtaatttgacaaattcgtcatagtaattttgagccatatttttttctcctttttagttctctaatttggttaaccaatattcgttttcataagtttccaagttttcttgataatgcagttcatatcctgctatcttcactaggtcttcaaatagcatagtcggtgcatcctctactaaaggggtttctatcgtccagtaccgcggaataagtaaagcttctgctactttttcagaaatgacttctttgtccaccaaaatttgaacgacttcttttacagtcaataatttgtgttgtgttttcatcagcgtttctttcctttctcatcaatcaaaatataatcgccataagacaaggtatattttttcccgcatgttggacattgatacaaacgatagcttttgatacatttcgctctttctccacaatcgcattcgacagtatgtggtgcatgatagtttgggaataattcgctgaagggaacaccccaataatcaaatttccttcgcatgattgattctgcctcctcttaggaaaggttttacttcctttcgttagttctttctttattgatttgttggccagaatgaatcaacgaaaagcgacaaggacaagggcgcgcagcgtgccatttacccttgtccttgtcgctttttggtgataaaaggcaacttgttgccggtctggcaaatcaataaagagatagcgaacaggaacgaaccttttggtgagaggaagcttttcctattttgtcttacaaagcaagaccccttatcttagtgaacgtgcaacgttcacttcctttcttctcgaacggcggtggcggttggagtgagagaaaggtttttcaattgagaaggcgcttgtgccttcctaaacaggcctttccctttcttcctgtttctatgtaaatcgagtagaggggaaagccaactgaccttccgcccctctcacaccaccgtacgtacggacccgtatacggcggttcaataagttgagtgtacgaactggtacttcaaggagatgtcctcatatccttggcgggccagttctttgtctgttaatgatcgatgaagaatatgacttttggagattgaccaaataccttttcttgtatttgaccattcatacgctttcgctttatcgatccctaaacgaatcagatttttccttttggttcttggattcttccattgtttccaaatatattgtctgattcttcgcttcaaccaaccgtttaactccctcatgaattctttcatctcaccaattccatagtagttgatccaaccagtcattagttgcttgatttcttttaaaataagttggatacttcttccacggtttcttttagtgagttgtttgagcttgcttttcacacgctgttttgcttttgcgtgagggcgaattttaatacctttctttgttggcagaatgcagaatccaagaaactttcgtttcaatgggcttcctaccgcactcttttctcgatttaccgtcaactttagttgttcttcgagaaattgaatggatttcttcatcacacgctgtcctgctcgtttgcttctaacatagatattgcagtcatcggcgtatcgaacaaatttatgtcctagattttctagcacttgatcaaattcgttcaggtagatgttacttaacaggggagagagattgcctccttggggcgttccttcttccgttgttgtgatgagtccattttccattacaccactcattaagtattgacggatcagttttaggacttgtttgtcctttactttccgctcaatgaaatacatcagcttatcgtgatttacggtgtcaaagtaggctttcatatcaatgtccaccacatatcggtaaccttgttcataataagattttgctttcttcactgcgtcatgtgcgctgcgatttgggcgaaacccataactattatctgagaattctggttcaaatagcggttgtaacacttgattgattgcctgttgaagcatacgatcgataaccgtgggaattcctagttttcttacaccgccgtttggtttcggtatttctactcgcaaaacaggctgaggtttatagttcccttggcgtaaattggatagtaattcctcgcggtgctctttcaagtaaggaagcagttgatcgacggtcatcccatctgcaccagccgcccctttatttctgactacttgaaggtacgcttgattgagattattccgctctagaattctcccaaacagattttctacaccatcttgtttcctctgttcaccgcaagaagtgctgcgcacttcatcatacccttcgtgttccacactagctctttgatgatagccaagttttcttgttttctgcggtcgtcgcatcttctcacacctcctaaattattcaagattcttattgttcagtccttcgtaacggtcagtgtcgttactactatgacctcggctgacttctcatgattcaccatcatgtcgccatgatcgttgtgctggtttgttttcattcaacgcccacaacaccctcatgagatctcccccggtaagagtgaaaactttcctcccatgtaactgctagatttactgtataggtttcgggcagtattggactttgtcttgtgatgaagacttatccgacctaattcagccttgtatctagtttctgttcgtcagttcaggagtttgcgtccgacttccttcagccacagcctcacgattgccgccttgtctttcgctaacagttcctactgccaagcctgtagtggactttcaccaccaagttttcacccatgcagggcgcacaacaaaaagagctgcagtcctacattaggattgcagctcttcttttatttatatgcccattgatcgcgtaaaatgatcagggtttctaatttgcatcgattcaatgactaattgattccgtttattgaaatgacctgtgacggcaatattgtattttccatcatccataattaacaatttatcgataatttcaatatctgcaactacacaattaatcgattcatgaattgtttgtaaagtaaagcgaaccaataatggttgtgtttttattactcggattttatcaagcaaaccaacatatttgttcatcacgatcacctcgctaaaattatagcaaaaacagttaaaattgagaatttttattcgattttagatatgctataatgatcaagacagtaaagtttgtgacggtggctatccgattgaaagtgaggtggtgcgtatgtgcgtacttccaaaatcttacagaaaggagaagccttttgcctgttgaaacggcgctaggattaatgattagtttcggttctttgatcgcaacaatcatttttggaatcttagcagttgtaaacaacaatcaaaaaaaataaccgtcagctttagccggtcgacgattatttttcaaaaataatattaagctggtcaccgtcttaaacggtgctgttaggggagttgttagcgcaactcctcttttcgtatccattataacaactttattgatcttttacaatcagaatggtaaatcatcatcactaatatcgattgattgtccgccaaatggattttgtgaagcgttcaatccattgttgttaggcgtagctacatcccgttgttcaaaggtggtagggcttggactgctggacgattgatcagcgtgcgcacgactctctgtcgttgctttactttctaatagttgaaagttatcagctacaacttctgtcacatacacacgttgtccttgttggttatcgtaggttcgggtttgaatccgtccgacaacgccaatcaagctgccttttttagctaatgtcgccatcgtttctgctggtttgcgccaaatcacacagttgacaaaatcggcttctcgattgccgttttgattcgtgaaattacgattaacggctaaggtaaaagtggccactgctgtgccacttgcggtataacgtaaatctggatctttggttaaccgtcctactaaagttacattattaatcatctttatctctccatttcttgattcatttgttgtgatcttttaaactgcctttttctttcttgattttcaattttgatcacacttttcattaggtgatcaatttcgttgactgtatctgcaaatgaaatggaattcgcaaacgtgttaactgagcgatatttttcccactgcttttccaaatagtcgtttcccctgatcttatccatttctctttcataataaaaggataaaggctttgtatctccacgttttgtaaatgtatttcgaacacttttgtataactctttcgtatcaatattttctagtttcggaatggtaaataagtcgtagtaatcttttgctctcgaattatctgtgccaaagctgaacgtagcacttagcttttctgcaataatttgttctgttggataagctggaatctccacttttttatcttcaaacattaattggtgatagtgtgtatctacttcaggataaatagaatctcctgttgtcacgtccattttaaacggtacacgtactttctctaaattagccaccaatttaatttgaaatccaggataaaaatcggcttctcttgtttccttcattccttgaatagagaaaacaatgccttcttttgtgggttttctagttaaatcattaaaaatgctcttcaatttttcttcagttaatttgctatttctaaatgtcgtatcgatatcaattgttgtccttctatcgattccatattttgatcctaataaaaagccgcctttcaaaatgaagtcatttttgtactttgattcagaaatttgttcaattagacgatccatcataaaatgccgttgcactaactgtgcatttaatcctgtactctttgctaaatttcttgtttttgctacaaattgtgtcggtgtcatctttttcctccatcaatataagctttgcatgtggtatttcatttctttttctacatgtatttttgtcatgtaatctcttaatttacttggatctctcaatgggtcttccatgtactcttttaatgcttctaatttcatttcatattcaatttcatatctcggattccaaatatcacaaagtgtacgctctttatcatacatagtaataggatttccttgaaaggaagttccctctacttttcctagttcataaacttctttcttcacgaaatgaaattgtaactgctgctcttttgtaattgaacgatcaacgttatagccatggggaaaagttaagtgaatgaatttcggcatattcgtagaaagctggtaaatatctaaagtcgtttcatgagagaagattcccctggaaaatcgttgctgaagccaaaataaatcatctattccatgaccatcctctacataataaccacgatcaactttgatcaattttccttgattcaccaatctttgtacagtggttgctgcgattcctaattttctggcttccttcatagataaatttccatcgcgaatagccaacaattctttcagtttctcttgcatttacttccccccttttgttacaaatacactacattaaatatatcatgatagtgtatttgtaacaaggttaatgtctatcgatctaattcaatttctttttgaatccgctgctggttctttaattgctgcagtcttcgtttgctggcacgcattttttcctgttctgaacgaattttggctttttgatttttgatttcttgttgtttatgtgttgtattacgcataagattaaccctccattattttgtagtgcgtcgtgttcttttcttgaagttcgtttttttcttttcagaaaattcaaagcctgtagtgaagtcttcttttaaaacaatcgttgcttcaaacgaacccttctgaccttttaaccctttcactggttggcttgttcggctattttgaataatctccttcagctgtgtcgctgtgagtttctttttggcaatcgttgtccataatttaaaatcacagacttcagacgtacatgctgccaccttttgataaagtatgacttcttgttcctggcattttggacaaattcctaaatgacgcgaggctgcttgcttttcactggctgctttcacttcttgtaacgtcgatccaaaatcagtggattggatttgccctggtacgacttccaataagtgagagacaaatttttggatattagctagaaaagtggtttgtgttccttttcgttctccaatctttaataagtagctttctggaatggcaacactttttttgacaaaaattataaggtgttgtgaatgctgcggtgttatggctccgattgcccttgacaatgagcatcctcggatctgattttctccggcagaagcacaatcattcaattacgctgcctctccagaggtatcagatccgcgctcattatcaaggattcgcttcgccaatctctgttgtcgaatttggatcggtgtttcatacgccaacgtgccatgtaagcgtagatagttccaccaatgcacataatcaaacaattctagacgtagctgtgccagtgtctcaaattggtattgatgcacgaattctactttgacagatttataggttgattccgcaacggcattatcatacggacaacccttcctactcaatgaacgagtaattccaaaaccattcagaatctcatgaatggtttggttatcaaattcctttccccggtctgtatgaaaaagcttgacgtctgttaaagaatacggtatccgtccaaaggcttcttttaccaatgaggcatctttcttctcaccacaggaataaccaataatttctcgattaaacaaatcaagtattaagcagatataatgccactttttccccacgcgaacataagtaagatccgtaacgatggcttccaatggctgttcttgtgtaaaggtccgatctaatacattcgctgttttcgcttcattacaagctgttcgttgccctttaaaatgagcgatcgtataggtagatgtcaatccgcggcgtttcgtgattcgaccgattcggcgccgactgagttgaagcccacgctttgctaaacacttcttcaattttcgggtaccgtaagcctttcggtttcgaataaactcttcctgaacgatctcttctaagtcggactcattttcgatcggtttcgcttgataatagtaggtttgacgagaaatatttagaattttgcacatcgctgatatggaatatttatgcttgttggcatcaattacttgtcttttcgtccgaatatcagcgccgcttgctttaaaatatcattctccatttcgagttgcttatttttctttcttagtgcgatcaattctgcttgttctggtgttaagttgtctctttctttgaatgagcccgttgattgtgcttgcttcatccatttatcgaaagaagaaggcgtaagctcatactctcgaataatttctgcgcgaggcttaccagcgagatagagatcgacgatttgttgtttgaattcttttgaataggttcttcgttgacgtcttgacatgaaaaatcctcccgtgtgttttttattattctacacaccttattttttctgtctagtctagtgtagccgattcatagtgacgcttttcagttgagtggatttcaatccaaaattctttttttgaaaggtcagatatacatgtactttttaggcattgatatcggtaaacgcactcacgttgcttctatcatgaacgaggaaggaaaggtattactaaaaggtttttcatttcctaacaccactgaaggagcagagtcattaattgagcgaatggtcgactattccggagcacccagtgactttgttatagggatggaagccacggggcactattggctgtccatcttttcataccttcacgaatcagattatttgattcacgttgtgaatccccttcaaacagacggatggcgtaaaggtacagaaatacggaaacgaaaaaacgatattattgattctgttttgattgctgacttaatgcgctatggctcatttgtcgaaacggtcttatccgatgaaaatgttttttctttgaaacaactttctcgttaccgaacttatttagtaggtacagcgagcgacttcaaaagaaaaattatagccgtattggatcaagtctttccagaatacgcgacgatttttaccaagcagggcgttttcggaaaagcttctaaagagttattgctggcgtttagtgccccgatcgacttagaaaacatttcctcagaaactttggcccaatacttagctgagttaagcaggaaccgaatcaaggcagaaaaagcggaccaattgaagcaagcagcttctaactcctttggagtaaaatttgctcaagaagcgttcaccttccaactacgttcaatgattgaacaattaaaattcattgaaagccaaataaaggaaacggaaagagaaatcaagcacataatggacactttaaattctgttattctcacaattcctggaattggtcctataaacggtgcgactattcttggtgagatcggagatattcaaaaattttctaacccgaaaaaactcgttgcttacgctgggatagacgcttccgtgacacaatcagggcaatatgaggcaacgcataatgttatgagtaaacgagggtctccatatttgcgaaaagccttgttttcggcggctttagtagcttctcaatgtgatcctgtttttagtgcgttttaccagaaaaaagtttccgaaggaaaacatcatctaactgccttaggtgcggtttctcgtaagctttgttacgtgattcatgctattttgactaaaaacgagccttatataattgtttctgattagctattgaacattcaaaaaaactaatggtaagaagcttatttgttgtacccttttttcggaattatctgttataaaatattttttgatttggctaatttttacttgactctatatagttagtctctccaagtgattgattgaaaatactttcccaaagagagtccgtatcaggccaaataacttgttccagattataaaaattgaaaatatagcaaactggtttcccgcgtattttcaagagttccttctgctttactgcttgatttaatattttgctgactctcgttcgttcaagcgttaaatcctccgcaacatccttggtactaacagataacagtaagcgttcacatttatcgattcgacttttttctttgacatattgaagaatattatctctcatgacacacccacccattctcctttattatttttactgtaagatatatttcgagtaatgacaaggagttattgacatcgcaaatttttcaattctattgtttgatttatgtaaatccatgagctgtttcagtattgaaatcatatttttgtagtccattctgattgaatccatataaaaaatcctatagaatcaatgagctcatcaattctacaggagtatttttcaagaaaattatattaggaatttttgaaagtggctgattatttcatcgaaattttgatattcaaaaaatgcgataccttgctcttgaagatacgttgtgagtttctgattctttttagcataaacaatatccgctgctttagccccttcaaaatcagatatactatctccgataaaaatgacgtggtaattctgtttttgaaagtcttcaatgacttttgccttattgacgccattctcttgatcaaagtaacgtcgtgatgtttccactgtcatcttttcaccgttgaaattcaattgatttgaaataatttttttgggagaaatatatatatccttctcttttagagagtaataaacgttttgcagtgtgccagcactgacaatcacaaagtcccaattttttgttagaaaatttttaaaggaatgatcaatcttcatctcatttcgcaatgtactaatatattcttctttagtgatactaagcgcttctaattgatcctttatatattttctaacagagatttttccagccctaatatctcttaagtagcctcgatgcatatctggtatatatttttctgccagcattgttgtactatcattaactgatatcgtcccatcaaagtcaatcacaaatatagtttgagcggacggctctttctttttcatgattaaagctgttcccgaaacgctttgactttgtccataaattccttgacgcgagcctgatcaacatgattttcaaaaatcccttcttttttgaaggtagtaccaacgaccgctccgtcagcgatacttaattgatcctcaacattgtttaaacgaacccctgtatttgcaaaaacaactgtatttggaacaacatcctttacgattttcaaagtagccgcatctgtttcggtacctgctgttaatcccgaaacgcataacgcatctggccgattattgaagacagttgatttagcaacgcttgtgatatcgcgatcacctagataagttgccgcttccggaacgatattaaacaatagttttacattttgtgcaccaatttgcttttggtgacgaactgtctcaccgacattggtgttccatagtccaaagtccgagccataaacacccgtaaagatttctctgacaaagactgcatctactgcttttgctaagtctaacgattttttagcatcccacagaacattaaccccaaaaggaatcttaattaacggttttaattcaccaataattcgtgccatcgcagccactgtttctgtacggacctctgttaaatatggtagtgagaattcatttgaaaacattacagcatctacgccgccttcttgaagtgctagaaaatctgcttttgcgtgttcaattactttttccatgcctccttcttcatcaaaatgtggatctcctggcaatgcgtcaaaatgacacatcgcaataattgccttttctgtacctaatttttcctttaaccaagtcatgttgttccctcctgtttattaatcttttaaagcatttctttttacaaagatcgctataaagcaagttgctacaattaaaatggccaagccaagataacccaaaaatccaacattagcgataataaagtcaaagacgtttcctgcccataaggcactgactttatcaccagtttccgaaacgccgcccttttcagctaatttagtaaagtaaggagaaatccatgtcgcaatatataagatacctatcatattaatgattccactgatcaatgttttcaaaatattgcctttatggataatcgtcgccatacaaatgaagaacgcggcaaatgctaaatcggctaagggtaatactcgatttcctggcaaaatcgctgcaagtatcagcgtaatgggaataagtacagttccaatgatcatagtagtgggatggcctaaggtaacagcggaatcaagtccgatatatacttctttgccagaaaaatgtttggcaaaaaatccttttgccgcttcagatagaggcatcaacccttccacaatgatcttaatcattcgaggaaacagtaccataattccacagacacccatcacaagattcgcaccatatttaaatccgtatcctgacaacaaacttaaaattatacctaggattccaccgataatcactggatctcccatgaagccgactttcttctgtagacccttaatatctaaatttgagttctgaagaaaaggaattttgctataaattttatctaaaatgacaaacaatggcacactgcttgcggcataaccttgaggaattgatatactctcgacccccaattcgttttggactctttttgccgtgtaatcagcagataatagcgaccaagcagcttgcactaaggctgctcccatccctaaaatcaaattacctgtcacagaatggacgactgctcctgtaaacgcatagtgagaataattgaaaatatcaatgttcatcgttttagtcgcgccgatagctaaaagaatcacatttaaaatgaaaactgatgggatgatcaacgcaccaactaccgttgaaaatgcgactccagctcctgccccagatccaagatcaataaccgttaaattaaaaccaaagcgttctactattaaattgactgctggtgatagaaaactggaaataagcccaactgctaaattgaaaccaataaaaccaacacccactgtgatccctgatttgatagacttgaaaaatcctaaaccaaagattaaaccaataacaaacaaaacaattggaacaaatactgttgatcccaaagataaaatataatcgagtattgcttccatcaattttcctccttaacaaatcatttttttaaaatctcaataattttagcggctgcctcagcttcaccaattcccacaagaaatggtgttccaaccaccattggcacaccgtaatcttcctcaacacgcatcgctgttacgaataaatcagcttctttgtacatatcaagctcacttaattgagcttgagaaagtgtataatctacttggttatcttctaaaaccgctctaactttttctgcaatcatagaagaagttgccattccagtaccacaagctacaataacttttttcatctgttctcactcctttcaaaatcaatattttttccaaaactttgagtaccatttaacgaatttagaaactctgctaacagttggtaaattcccagcgcatcatccaaattgatcacttcaataggtgtatgagtgtaccgagtaggtagtgaaatattcgcgactactgttcgattactttcaattgcaatataggctgtttcagtcaaaatccctgtagccacctctctttgcatagaaatccccgcttttttcccaatatcctctaaataggacaagaactgtttattgggaacaatgcctgccaaggtaccgcgactgtggtgattcatataagtcaaagctggaccattgcctaattttatttccgataatcctaataagtctggagtatctgttgctggggtaacatctaaaccaatgacgatttctggatcaatctctcttactgttggcatgattccacgcgtgttgaattcttcttgaacactaaatactagatataaatctacattcaacttctccattggtaaattttcaatcagatagattaaaatgcctaacaatgcacgatcatccatcgccttatttgcgatacattttccagttaattctagaaattgcggcttaaatgtgaccggtgagccgatatcaatacccgcattcaatacctcttcacgacttgtggcaccgatatctaaataataatcacgagcattttcttgcgtttttccttctttttgttttgctaaatgatgagattttactcccactacgccatttacaggtcctttttctccgtgtagctcaagctttaatccagcaagacaagtcggattcaatgagcctaatttctcgcaatgtatgaatcccctttcatcaatatgattaaccatcatgccaacttcatccatatgaccaaaaagcatcactttttgtttaccaatattatgtggtgttaaacgaactgtcatattccctagaatatcaagtgagatttcatattgatccccaatgtcctcaattaaatactcaataactttatcttcataaccgacatttcctggtaaattggtcaattctaaaattaactgcttcaatcgttccatttttcttttcctcctttctccaaaaaattagaaaaaatcgttgtcaactcttcttttgaagttacttgtttgatctcttgtataaattgttggttggtaaataattgtgctaaatatgagaggttcttcaaatggagtttcccatcagtgaaaactaacccgataaccaagtcaacaggtaacttatccaaagtttcagcgtttcgaaacagtacaggatgagctggttttacaagaaacaatgtatttttagtgacattttggggttctgtatgacagatagcaatattcaaacctgctagttttaagccagtaggatatttttcctctctagaaatgatggcttgctcataggtttccttcacataacctttttcatataaatctttagcaactaaggaaagtagttgctgaaccgatgtatactcttcgtcaaaataaacaaaatcttgatttagcatctgatcacactccattgagccacttcttgaagaaatcagataaaggctctgcttcttcaattgcgtggtctaatttttgatagaaattttcatcatgggaaaaagcattaatattcatgacagtatttattaataattctttttccttagaagcgataaagaaaatcagtttaactggcagctcctttggaaaaataactgaatctttcacatataagatatgaatgcctgaatttaaaacaccgcttttttcacttccgtgagggatcgccatttgattacgaatgacaaaatgagcgccgtataaattgacggattgacaaatcccctctaaataactcttttttataacttgtttccgttcaagaaaatcactgcataatcttaatccagtttgccaatcttgaatatctcgaactaaagttatattttcgtctttcaatccatcaaataaactagaatctttccgctcttcttgaatattttctggaaaagcatccattaaactctttttcaaacttattggattaggaatatttacatgatgctctattatttccagaagtttatttactgaaatcttagttgtgtcccgcttacgagtaatgccgaattcctttaacttctgatcgtcattaaaagtcagaaatggcgaaataaacaaaattggaacttctactttctttttgatctcaaaagaaaaatctaatgtgctaacaaccaactcaatgttctccgaaagataatcacttatctgataaattgatgatgttcctatgacctcaacattgtagtttttttctaacagattcttcaaaagaaccgatgttccatatccagaatgacaaaccagcaaaacttttaaatttggctgatgcgcctcctgaaaccttctgattgctcctaaaaaatgaatcacaaacaaggcaatatcctctttagaaaaatgaacatccagctctttttcgtaagttgaaatatttttttctaataacgaaaataaattttgataactcccaattgcctgatgataaacttcactatccatttcataagaattatttttgcgatatattgtacttttcacatgttggtacaatccttccattaggatagggtcctctgttagctccattccaagttcgttcccaatattagtaaccagttttgaaacaaatatcttgaatgataaaagatttctttgataactctgatttactgactcttcactataactaactaaaatttcggcaagatgagcaatctcttcgtcggaaaagttgatattgctgttgatattcttgaaaattcttttaacgatatcgtattcatctagtgctttaaattgagaaaggttttttacttgattgattgaatgaccataataaatacgatgaatcgcaacaaagatatttaacaaaagagtttcataaaagttagtgaatggataatttttagagagactttttatttcctccactatttcttttatgtctagatcaatatccaagaagtcttcaagaatcgttcgtttagtcggattggagacaagtaaattatcttcttcagaaactagcactaagtagctttctctataatgatttaaaatgaaactgcgcaattccaactcgttatcgttaataattttgcgttcctttaaatggatatgctctcgctctaaaattggaataatctgcctcaaatctgacttaacggtgtttcttgtaacatctaaaaataatgactctttctgaatattgatttttccggcgagtaccaatttgaattttaagtactctcttctctttttcgaatcaggtttgtagatgtcctctaataattgattcacagaatcaaaatttgagatacttgagaatagctgtccattgttttctttctttatttctggcattttcatcattctaagataatagtttaagttctcaatctcgtagcgtatggcactttccggaatatttagctgcttctcaatatctttaattgatgtttgagaattcttttcaaaaaagtaaattagttctagtaaacgctgattcgctttcatttatttacctcctttcggttatttattacacctctagcatagtttagctggaaatatcatacaatgatcagaaatttgaaaatctctttcaaaaattgaccactgaaaaactgttgaaaaagaattattgtataaataaagaagaaaaagaggagatgaaattatgaggaataggattataccatccttagcatctgcaaaacaactctatttagcagaagaaatcacaaggatagaagcactgggttttcaagagatccatttggacatcgaagatggaaactttattaataatattacttttggtatgtccacaataaatgaaatgcgttatttaacgtcattgccctttaatatccatttaatggttacacagcctgaaaagtatgtttatattttaaaaaattgttcaccctgtagcgtttttatacatgtcgagtcatgtcaaaatatcgcagaacttattctttattgtcatcaaaacaatatttcaattggcttagcctttttaccgaccactccattagaaaattactcatatttaataaaaaggacagcgatgattctattgatgaccagtgaaccagatggtcagggtcaaatttttattgatgatatgactaaaaaaattagtctagctaaaaaaaatttcccaaagcaggagctttggattgatggtgatataaatatagaaagagctaataaattacaaaagctcggagtagataaatttgttatgggaagagagctttttacttcgcaggaaacaaaaacagagccgatttagaaagtttattttctaaatcagctctattttcatttatagattattccatcttccctacaactttcactcgtagtcgtgtcgcattttctgggtggtaggccagtggggtttcttcgacttcaaccagctcaatggtttcttcgatagcccctgctaattttgcttgatgggtcgccttttgtttggcgtcattcatgctgtcttctcttgatagttttgtataaatgtagatttgttcgtattgtccgcttatttgtgcaatggacgctccgatcgcattggcgacgccgccatgtggattgtgataaacgtttgctactccggctagttcttgcggaataatgattgcgccgccaccgactaatatcaaatccacatcgcctgaactggttttcattttatcaatcgcttcttcggtcatttgtttgattgttgcataggctttttcagcaagctccagcggaacatcttcaaccagtgttttgtctccaatatcggcaagacccaagcgcacggcgatgtcagtggtggttaattgctttccgccaaatacccgtgcttcttcagtaatcttgtagccaacactgtctggaccaacagtaacctgatcacctacctcacgaacgatacttccgccaccaagaccaatggaaacgatgtccggcattctgaagttcgttcgaatccccccaacatcaaccgctattgaggattctcgcggaaatccatctgctagtacacctaaatcggaggtcgttcctccaacatccaagacgatggcatttgtgattctagccaaataagaagctccgcgaatactgttcgtcggtccacaggcgatggttaaaataggaaaacgtttcgcgtattcaatcgacattagcgtgccatcattttgacagagataaatctcagcatcattgatcccttcacttttcagtgcgcgttcaaagccgctgctggttaacgccatgaccttgtctaacgcggcgtttagaatcgtggcattttctctttccaacaggccgacagaaccaatttgcgaggagcaagatatcggaatggattcgcctaatatttcttttgcccatttttctacaagcagctcttgatcgtttttcagcgaagaaaagacgccgacaatcgctaatgattcaatttttccctgccaatttgctaaaactgtcttaacttcgtcttcatccatttccgacaaaatctgaccatcatattcatagccgccgggcaataattcgaatttttctccgagacattcgatcatgtcctctggccaagccgtgaagggtttaacggaagcagtggcaggatagcctagacgaatcacgccgaccttcgatagtttttttcgttcaacgatcgcattggtacattgagtggtgccaagcatcgcatggctaatactgcctgcttcaatctgagattcagccatgaccttatgcaaagccgtttcgatccctgtttgaatatccctgcttgtaggcaccttgacaccatgaacaagctccaaattttcattaatgatcacagcatccgtattggtcccgcctacgtcaattccaattctatacatgcttatgccccccttttatcgctaactccttcaacggaatataatctaaatcgtagccaaaatagcgcggcccaacagtgttgatgccttctttggtttgccatttttcatgacaaggtaaggctaaaacacggattcttttcccgtattttaacgcctcggtggttacgggcatcaaggtttctaaatcaaccatacagatcagatcgggcgtcatggtgatgacactaccatctttttcagcgatcaggttttcattttggaaatagatcttcatagtcgatcctgcatcctgattcaagccttccagagtcgcttccccgaagttaaagccgccttctactttacggatgacatccatcatttttccttggaacagctctagaccatcgattaatttaagcaatttttctaatttggttgcttcttctaaatcgttgctgtggattacttccccgattttctctgaaagagtcacaatgccgtgaatgccatgatcttttaattgacgaccggtagctgggtaaatgctgatcaatgaactggctcccatctccactgtttgtactctggctaatcgctctgtccatttgttgctgattgtttctgaaatgccgatatttcctttttcatctgtgatggccatcggtgttgaggagactccgcctagattaaaggtcgtcatctgaagctctggaaatgcccgacccattccatcacaatcgacaatcggaattccttgagaagcagctaccacaataggaatcatggaattcacaccgcctgcctccattggaaatgttcctgcgatttcttcgattcctaaatagcggctcagcttctggaaaacccgaagaaactcgtcgccttttggaaatttctcgatcaacactgaaggagcacccatcatggctgaaggaataaagaagtcgtcatcctgaacttcatctggagaaatcaagcgtacaggaccgtgttctttaatcgctgatagggccatcattttaccaatatagggatctccgcctccacctgttcctaagaacgctgctccaacagcaatattttcaattgcttcttcatctaaataacgcatggttattcctccacttcttttgtatgcattgctgattcagttgtttctttcataaaaatcttgttcccaatcaaataacagctaaaagataaaatgattccgatcaatggctgattaggaaattgcggcagtgatgggaaaaagcctagcactacaggtattactgcaataactgcaccgattaaccaagaaatgatccccagccaattgactcctgaaacgggtgcccaatttgaaggttcgcctttttggacgacccagtaagaggcaatcattactccagcaactgccggaaccatcgctgataagatggacataataggaacaaaataatttaaaatccccacaactgctagtaaggttccgataccgccagcaattgctacggcgattttttctttttcttttgaaataccaaacacattaataatggctaacccgcccgaaaacgcgttaatgacgtttgttttccaagtagccaagattagtgcaatcccttcgattagcggtgagccaatgttcatgaacacactgctaatatcagaggttttattgacgatagccaaaattgctcctacagcaatcatcaatacgcctgccggaataatcccagcacttgcggcctttacaacatctgaacgcttttctgaaaactgcgaatagtcgccggcaatgactgctcctaaggcaaatgacccgatcgttaccgccaagccgtcaaaaaatgaaagctgactcgtcggctgatacgcctgcaagagttggttgccttgtccagaggaaagagcctcgaataggccatatagacacacgatgacaagatacggaaccgcaatgtagttgatcagacgaatcaaacgaatcccataaattgctgtaacaagcataatgattccccatattattgaagagactgggactgaaatatgaatatcgtatagacctaaaagattagcaaaggctgctcctgcaacatttgtttggataccaaaccatcctaagcaagcaatcgctaaaataatggaaatgattcgttgcgatccgacctcgccaaaaacctgttttgcaatttgaacagttggtttatgcagatccacgctttgcgttccttgaagaatcataatgactactgtaatcgcatatccgatcagcccaaccaacaacgcttttcccaaactcattcccgatactaaggtactgccaattaataaactcgggacacagaccatcgaaccgccccaaataaatgctaagctgtaccaggattgtgttttatttttatctttcatatcgttccccccttgtataaatcccgattatacgtgaggcaaaagcagatgtctttttctaaatgaaaaataaatgagaatattttttgtttttttacaatgcaaataagactgcctgcactatccagcagagattggatagtgcaggcagccaagttcttcgatcataagaggtttgaacgacgaacgattcgatagaccagacaagtaattgaatattcatagctatcagagattctcgtcacatcgcagcccaaaagctcattgattcgcttaattctgtatttcactgtatttttatggataaataaatattccccgcatttttgataatcggcatcagcatccagcagaaacgtacataatgtgtgcatttgctcggtattctcaataattggttggatgttcctcaatacctcatcgacttttacttctccagaacgtacgtacaagattgcttgctgaacttggcgcacttcgctgattgtaaaatgctttttaccgataaacagggtcgaaagttcttcctttaagctattgatcaattgataattttttcgaacgtctgtcgtgtttctcaaacggggacaaaccgccagactctcaatttccatcacaaactgactgctacctaaaaagttttcactcaaagctacctcctgctcgttgtatcgataatttcctagcaaaacaattaattggtcctccactagctggacgatacttgtgtgatagtacttggttacgtagtcaagaacctccgcttttatctccttttctttttcaggtcccttcagttgaaatagccacattaaattgatactcttgacatcaatggacagtttgtttgccaagcgatacattttctcgctttcatcattcaagatggctttgaccagtccgtgctcactcacttcgccatgctttttcccccacagatttaatgcgacttggatcagctccaccgactgctcgcattcagctggcgttagaggttcatgctccttgactaaatatacgttcaatacgccattgtccttatgaaagatttctctagaaaatacccaacaattctctttttttattggcgcattggcatttcgatcagcattcaataaaaagtttgccagctttagttttgaatttctcggccatcttatttgattgattatttctccttcatcatccgtcaaaataatgttggcccgcagcaagtccgaaagagattttaaactcatttcaacatttctaaggtgctctggtaaggaagacgtcttctctaacacttcatttacgatattctccgttgatttttgcttgagcagctcggtcatcacttcgactattacttcgttgtatctcaacgaataatcattctcaggcatttttataatgacaaagcctagctcctcggccacatcgataacctcttgcgccaagtcatctaaaacaatgccgacataatacaggataataccgagctctcctagtccatgcagccggcgaattgcttcacattgcttttcaacatcgtccttgatcgtaaaaaaggaaccaatgaccagttcccctgcgtaatactcatctggcagaccaattttttcattgaaaaacgacatgtcagatacttccagaaaggataaagaagtcacggtattactcagattcgtcgcgccactcactactttcgcttctttcaatgaaggaagctttaacaattcttctaattttacacccatataattcccctcttatcctttcttgcttttttggtggctggggaggtgattgcgatcaatttgatagttcaagtcctctattttaagagaactgcttcgtatgatctcctctcgacatgtagaatcagttaccgctcattcagcaaacccagccaatagaattattctgattatatcaattcaagaattcacttgctacacccagctttattatggtcaaagttaattcagaaattgaagcgaaaaattcgagcctaaatcccattacttcagaaacaagaagttttatcccacagatcgattatgaacagattcatagcgatccgccaaaatgtcgattaatttcaagtgaaatacgatttatacttatgagagagtggaaaagcattttatctactgataaggtggatcgtaacttaccaccaggaaaatattcattattcatgctagaatgatttttcgaaatttgaagatttagagtgtaagaaacacgaaagccctactcggccaggagtagggcttttttttatcaccagatgcgatagttggcgcgcggtcaggtagacagttgcacttagttgtcgcctcgatcatctaaccaatgatcgtccagttacaatatatcggtatcacccaagaagatagaatacagctgtacgaagtttggatttatgaagaaaatttgagtaacccataatttccatgttttatattcgccgattgtaaaattaagctagacaacttaaaaaagtcatttgtgctacactcaaaatagttccgaccaaagaattatgaggagtgagtacaaatgacctatacccatcttacaacagacgaacttgttttgatagcatcttatttcaatatcgagaaacctgtcgctcttgtcgcacaaagtttaaatcgctctagacaaaccatttataatgtttattcgtttctcaaacaaggaaaaaaagtgctagattattaccgtcaatacaaacaaaataaatctcgttgtggacgacgttcaaccgttttatctgatgaacaatcaacatatgttcaagaaaaggtagctcaaggatggtcacccgatgtgattatcggccgtggcgagtttccaattgattgttctgttcgtacactctatcggatgtttaaaaaaggcctttttgacacacagtcgttacctatgaaggggaaacgtaaaccaaataatcatcaagaaaagcgtggaaaacaggcctttcgcagaacgattcatgaacggaacagtctctatccacacctgactaaagaatttggtcatctcgaaggcgacaccattgtgggagttaaacacaagagcgctgttattacattggttgagtgtttatccaaggttattattactttgaaacccacaggcagacgagccgaagatatcgaaaacaggttaaatgattggttcaaatccatgcctaaacacttgtttaaatcgatgacatttgattgtggaaaagaattttccaactggcgatctataagtaactcgaacgatattgccatctttttcgcagatccaggaacaccttcgcaaagagggctaaatgagcactcaaacggcttgcttagacgagatggcttacctaaaacaatgggctttagggacacggatgaaacctttattcaatccgttgcctcgaaaagaaaccatattccaagaaaatcattaaattatcgaacaccattggaagtatttttgagctgcatagataaagacatattgtctagcttaatttgacaaatcagaattttggcttgtgctaagattcttttataaggtatcgatgacggattggaatccaaacgaaagtggtgagtatcatactataaataaagaagcagctgatttaaagtctcctcgcaaataaaagaatttccgattgattaattcattagcatcacttttattgcctttgtctattattcacctaatacttggattcgacatacacgttttcgaatgcggttttgatcaaaatcaataaagtaaattgagccaacaacaccaatagccaataaaccgtcatttaatgcaaacgtctcgcttgctccaaacatagaggctcgaatatgagcatccccattcaataatactgctggatctgaaggatgatctgaatgggacaagctgaacagaaaatccgtatgcgccggaccaggataacgataatttgtattttcagatagctctctaggtatcagacgatctaaaaatgcattcatatcgatctgaagatagtcatccccattaaaatcaagatcatgcataaactcttcaaagataacagagcaggttgtgtgttgtgactgaactaagcataagccgtttttcactcctgtttcttcaacaaatgcttttacctgttcggtaatattatgatacgtcacgcgacgtccattggattctaaaataagctcttttgttaaaactttcatttattagctctccttatattttgcgacatattgtatcaattctgtcaacgtctctttaggagagtcggaacaaacgattccactcgtccctccggttccatccgctccagaatcaagtgccttctttacatccgctgcggtgcttattccagctgcctgtagcactttggtttttcgagaaatttctttgatagctagattgcattctttcatgtagctagaatcacttgttttccctgtaccaatcaaatcagtgggctcacaaacgatgattgagggttcaagtaaggccactgcttttccttcagtcactgagtttgcacaaacaatcgtgtatagctctgattctttggctcttcttactgcttgttccaattcatgatacgtcataggatgttctgcatgatttaagaaggtcgctttgaaaccggctgaaattaatgactcgggaaaaatacgtcccataccttttcctctggaaataccatccatgtgctgagcggtaacaattaaattctcagtatttcttataattgggtaagcttcagtaaatggaactgtaaagaataccgtcaattgataacgttttgaaagttcatccgctgcttttgctaattccagcagctctgatccaaataagtatccctttggattcacacaaaaaaatggtgcttgaattttcttcatattcttatctccaagttttagtagcaagcaggtgataatattcttccagtaccgctttcattccccgactccgaagattttctaattcaaaaagctccattggtcgtccattattgatggctttcattccgccctcgactatatctgtgaatatattgatcttagctaattcttgaggtgtactgcaggttcgcatataccgcagcctatgttcatcctcagcaatactcataatttcaaaaagcgcattgatgtgactctcttgatttattggagcaataataaacacaaaatgaacgcgctcacttcttgaaaagttcactccttgtctaacatgcagcaatgaaacagctaattcatttactccttcttctgggcgagagtgaggaattgcaacttcatttcccaaaacaatataagagtcatccatattatgagattcgatcatcgattgaatgtaatttgaggtaatttgtccctttttcaaaagagggcggctccctaaacgaatcgcttcttgataatcttcgacctgttcaataatctgaacagcatcgagtgttaaaacatccagcaaactgatctcatgatttatttcttgatcgtatggatagtcatctcttgtttgaaagagctcgataagcttcttttctaaggctgtacgatcgtgaacagttgaaaaatcttctatagttgtcattattttttctaagagttgccccgcttcttcctgaacacccccatttgtttctcgtaatacacgctttttcaatatctttaactctgattgactcataataggttttacaataaagagcttttctacatccttaattggaacagttgaaaaaactacatctattttgcttttaatttttgaaaaatctctcaatgtgccaataactctggcgaaagataaaataatccatttcttgttcgcataacttctggaaaattcaatccttcacaccagccattgattttcttgatgctgtaatttaactgattgcgagtaatgtggaactccttcatgagcgtccgactatcgacttgagaatggtataccagatagttcaaaatccgttcacttctcttatccacttcaatcatcctttcatgtaatctaaattttcatcatcaacccttgtatattagagttagggttttaaccttccggttttgattggataaccctatgaaccatcgttattttaatttggtattaactcatttcttttgagataatatatttattggattgagaggctaagccgttccccccttgggtcattgaacccgcactcgagagactggctcctctctctgataagtggattgcgtatgagttagatgttgaaagtccttactttactccgtatctcgtacaaggtagtgacgcttttcagttgagtggatttcaatccaaaattctttttttgaaaggtcagatatacatgtactttttaggcattgatatcggtaaacgcactcacgttgcttctatcatgaacgaggaaggaaaggtattactaaaaggtttttcatttcctaacaccactgaaggagcagagtcattaattgagcgaatggtcgactattccggagcacccagtgactttgttatagggatggaagccacggggcactattggctgtccatcttttcataccttcacgaatcagattatttgattcacgttgtgaatccccttcaaacagacggatggcgtaaaggtacagaaatacggaaacgaaaaaacgatattattgattctgttttgattgctgacttaatgcgctatggctcatttgtcgaaacggtcttatccgatgaaaatgttttttctttgaaacaactttctcgttaccgaacttatttagtaggtacagcgagcgacttcaaaagaaaaattatagccgtattggatcaagtctttccagaatacgcgacgatttttaccaagcagggcgttttcggaaaagcttctaaagagttattgctggcgtttagtgccccgatcgacttagaaaacatttcctcagaaactttggcccaatacttagctgagttaagcaggaaccgaatcaaggcagaaaaagcggaccaattgaagcaagcagcttctaactcctttggagtaaaatttgctcaagaagcgttcaccttccaactacgttcaatgattgaacaattaaaattcattgaaagccaaataaaggaaacggaaagagaaatcaagcacataatggacactttaaattctgttattctcacaattcctggaattggtcctataaacggtgcgactattcttggtgagatcggagatattcaaaaattttctaacccgaaaaaactcgttgcttacgctgggatagacgcttccgtgacacaatcagggcaatatgaggcaacgcataatgttatgagtaaacgagggtctccatatttgcgaaaagccttgttttcggcggctttagtagcttctcaatgtgatcctgtttttagtgcgttttaccagaaaaaagtttccgaaggaaaacatcatctaactgccttaggtgcggtttctcgtaagctttgttacgtgattcatgctattttgactaaaaacgagccttatataattgtttctgattagctattgaacattcaaaaaaactaatggtaagaagcttatttgttgtacccttttttcggaattatctgttataaaatattttttgatttggctaatttttacttgactctatatagttagtctctcttcgttatcatttgagctcacccatagtataggtcatatatacaacgaaaagtatccgctttcatccccaattttaagcaccctaatcaacaagttgatgatattcaattttaaccgtaaaatctcttctctgctatttgttatttttacttccttttcaaaaagacttttgaaggcaccaccagcattcaaataattgtttataaataattggtatcattcatataagagatccctaaaacagcaaaaagactaattggctgttagtagctaattagtctggttctataatattttgtgttggttgaaaatcgaaggcgattttctactaacacttttttcttcgtttcaactcaaaaagagactcacttttggtaaaatttagtcgaccaaaacgtcaccctaccaaaggagtctctcaatggataatcatactagaaaattactcggattaacagataaacatttattttttgatgaagaatggctgattgaaaaagaatataaaggcgttcaagcgcagtttattaaaggaaaattggatgactctccttcctgttgtgaacactgtcgatcggttcgtattatccgcaacggttcctatacgacacgcactcagatgttgaaagtcaaagaaaagttaactattttagaattaaaacgtacccgttttctctgccatgattgtggacggaccttttctgcgaaaacggacttagttgatgaacatcatcaactaacaaaggaactgaagcaggcgattctcatggaactgtacgaaaatcaatcacgtaaactaatcgctaagaagtacttcgtctcggatgggacggtgacacggatcttgcgtgaagcaacgaagcattaccagccacgtatgaacttccttccgacggtgttgtgtatggatgagttcaaatcaatgaagtctgtttctggttccatgagttttatttgtgttgatgggacaaccaatcagctatttacgatccttgaagatcgcagactttacaaactaactcaatacttcctgcgctttcctagaaaggcccgtttaaaggtcaagtacctagtgatggacatgaatgccagctattgtcagttgcttaaaacggtctttccgaatgcggagatcgtaactgaccgctttcatattgtccaacatattaatcgcagcttcaatcaattgcgtgtccagatcatgaatcgttttcgagcctcacactctgaaaatcagaagaagtaccgtcggctcaagcgatattggaaactcttactcaaagattccacgacattggagccactcaaaagacattatcatcgactgtttaaacgaccaattagtcaaacagaaatcgtcgatgaactgttaagctacaacgaagaattgcgaactgcgtatcatttttgtcaattattacgctattatttcgttaaacgagatacggaaggctttcaagaaacccttaaaacaatttcatctacgttacctcagtcgtttaaaaagaaattcacgatcttccatcgctaccaatcgggtatttcaaatgcctttaaggtgtcccactcaaacggcgtcacggaggggctgaataacaagatcaagctgattaaacgaattgcgtttggttatcgcaacttttataactttcgggcacggatctatttacaacaaggtctgatctttgaaaactaaaaaatatgcggcgcacagaacgcgtcgcatatcggactaagttttattcaaatttgtcttcaccaacacgatttgacgaagagccattagtcttttgcttcgcattttgtattattttaaaaagggcattctctgatataaaaacgattacgtgtagacattttcatttaaaaaagtatcagaattttaagtgaggaatgagtgtattattagctttttaggatcaaaattaacctcttttctgtcaaaaacgctgcttctcctattcttaattctgttaaaaaaaatcattgatctgatttgcctcccccaacgtaaatcatttctaaaaaaagtgaagatagcaaaataggtaatttttatggaggggttttctatttttcattattaaaaagtatagccttcggaaaaatatgaacgataatctaaaaaataattttcaattaatgagtcttgcttgcttatcaatttttcagccaattcaaatatatatttttcaataaaattgtacttcctacctattatcaaataccctgtggcaagttctctactaggaacaattaagcctactgcattacacatgttcactacacgaacaaaccctttttttccttgaatctgaattgtcctagtttgtttatcaaaatgtccaaaaagtgtttctcccattccgtaaacatcaatcggtccttcttttgaaacgacaatatcaaaatcggaaagaagtagcttaagcgaattaatcaattcgtttctactcgcttcatatttatagaagagattcgtagtttctacagttatacactcatcaaacttagcccattcatttttatcaatctcagaatctacagcaatctttatctttttcttttttaaattatcagctatgaataatgatgatgcctgtttgactaattccaaatctctactgataaatccaatagaagggataaaagagattccatctgttgatgtctttgaatatttcacataatctatccattccgatccgagattaggatgaatatatccaattaaatttaaagcagctgcaggagatggtaccgagcctccaccatctgttccaacctcaagatcatttattccatagaaaacatttactgctgtaccgcttgatgagcctgtcatgaaacgacctgtaattggattttttaaatctatatcaatgcctcttcctttgtgacttgccttatcaatcgtgtgaagatgaaaaccattttgttccaaatgactgacaaatgcatctggaatcatagggacttgtttaacgcccatataatagtcagcttctgaatgaatagttgtgatgcaattaggataaacagttatcactgattggaataaatttgccattgccatacttgttttcagtgaatactcttgaattctttgaatttccatactcattcctccataaaaagcccgatctagctagtgtatcaccgtagatcgagcacatctgattagtttgaaattaaatcagctaaaaatgattctccattttgcggagcacctacattgaaataatcagcaactgttgcgcctacgtcagcgagggttttgcgctcaccaacatatttcccttgaataccaggactgtaaattaataatggaacccgttctcttgtatggttgctatgaccgattgtaggatcgtttccgtgatcggccataacaagtaggatatcccctttattcagatacgggattaattccctgattcgtcgatcactaagttctagtcggtctgaatacctgtcgacatcttctgcgtgaccggctaaatctgtttcttgaatattcaacgctataaaaccatgttctatcccttgaacttcttgaattaagtcatcgaaaagcttatctgaatccacccctggaaatagtcgtttactctccgtttggataatatccgctactttacccagaaaagaaacaggaatttcggcattatctaaaatcgttggtgtttgtacatttttgtcaatgccataacctagatggaccacttgatagccgtgatcataaactcccgattcaggagcatctaccccagctatctcattatttttcacctttcttgcctttaatagattgtccaaagtgatctgttgtcctccgaaagtgattactcgagacacttgaacgacctctcgaactgcctgtcccagttttttcagctcttcaaaactgattaacgctaaacaagcggatacattataaacttgaccataatccgtttccagattatctcctacagttgccgcttcattaaccactaaaatttgtgtgcctttttctcctacacgtctaaccttgtacccttgcttaataaggttttcttcaatttcgtcaattttttgattgaaaggttggattaaaggtattttaggggtagttcccatgatttcttggtgtcccaaaaaggagtctgctccgtgatgggctaaattgctggttccatagtttgcctcttttgaaaatttatggtcgcctatttcatatccaagagcgttcattaaccccaatttttcaagagttggaatatgaatggcttcattcttttgtataatatgtcctgctgtgctacttccgatgtctcttggacgaacttcctttacatcttccatcgctccaacaccaaaactatctaaaacaattacgacaaatcttcccattgtttcaccttctaatcaaatttcctagactgtcataaattccttcaatttttgttattcctttttgaataccagatactactgctacatcacttctagtgacaaaaatttgtgttcgaaatgccgcgatgaccgtcgagcctatcgggtgttctctttgagttgaaagatagtaatcaatattctcatcactgaatggattcacattatctctcactaaagagtgggcatctccaatcaacgcagagctaaaatggcctcttcgatagtagcctccgccataaaaataggcctggccatctaaattgtgcgagacttcactgacatataccattgctggtttttcgggcaaatccattttggcatgcagaggggttgtgcctgttaatgcgtgtccaggctctccttgtgtgccgcctatttccttgattaaaggaattgtttcgtgacaagtggctgatggaatattcacctctgtaatttcaataccagcttccttaaatatcatttttgcttttttaatcgtctcaacattgtttgtcggtaataatttcgctttaccatcaaagagaaaacatggaaaagacgttacaccagcaatttcaactaaatccgttttattcgataaatgagcgatacttggtaactcatttaagtgaaagccgccaaattgtccctcgtagatttggtcgtccttttcaatgactttgactaaaattttttgtttgatgttcagctctatggcaatactgataatttgctgtaacgcttccaacgaatagatggtcatgtactctgtcccataaagcatgatcctttttaaaagtcgctgtggaatttgtactaaatggccaacatttccaagtggcagcccttgttccatcatgattaacgcttccttgaagtccacaacaacagctttttctatccctgcatcatgaattttttgcgcaacatatggattccgtccaaattgctttgtcatgtaaaataattgaatcccttgtttttttgcatcgttaacaaggcttaatgtattttcttcaattgtgtcaagatccaagatataggtatctggaaggaggagtcctttttgatgaagttcaactgctgcatcaatcaagttgggatttcttcgggcagtgacatctaaaaacatcctattcctccctcagcatattgatgatgtgaagataaaagtagtctaactctgtctcatcaaagtgcttgtttgaagtcatttcttgaaggtcttgccataattcttttgagtgaagaaatttttcatccgcctcaatttctgcgcggataaaagactctaagtcatttatggtttcgcttttctttctacgcatatcagccatagcaagatgcgttaaaaaaacatctgcttgttgttcttcctcgatgacgttctttttcagtaaatactctaaaacactcaagacataaacctgtgtttcctgatcaataatctcagagctaagtaatattgctaatttttctcgaatcatgctgttccccctagttacgaatgaacgttttttatttattgaaggataaatttcatggtatataacctacccttttttggtttttatggaaaagagaataatttaaaaaaattagtactgaggaatcagctttccatcacatacgtctttttgaatgcatagaatttttttcttgtctacgcttttttggaagaatgctttcattgaagaatcatctttttgggtaatgattactgatgtgctcatatccttctccatctcactttcagttaagggaacataatgtagtccttgatgattcttatcacgtatttcgtcaaagttccagataccagcatcaatttgtcccatttggagagccgcaataatttgatgtccttgcatttcaacatactctacctgttcatctttgattatcgcttttgtcagtaatcgttgatcaattgagctatagtcaatggctatcttcatattcttttcaatcttcttctgattcttatctcgaaaaagcaagacgtgctcacttagataagaatgtcgaccaaaattaagactaatttctattggttccccatcggaaatggcttgctcggcggcaaattttgagacaaccgcaaagcgatacgttttatttgcgatagaacggactctttccttcgaacctcgaatataggccaggttcagcttaatattattttccttgaatacgtcgtaaatgccggtagccagtccttcgtaaagtcttgaataaggcaaagtcatcgttccaagaatcgtatctgataaggcgtattcttgcaaaatgctgtaatcaatttcttcgatgaaggttcccatatgtccgtgactttttactttgatcgcttttatttccttcaaaaatgcccaagcattttgtacggttccccgagaaacggcgtacttattttgatattccgtcacactcagtacccgatcacccttttttttctgtagtagatcggaagctaaatagttaacaacaattccttttttctttaaaaattcttctcccatagaaactcctcattctttaaatactcgccatggccttttttagaatattgataatagtatcggttcctgctctattcggattgatccgaatcattgtatcttccgcagcagggtcagcctttctaaacgttcccgacaccctataaaccagcggtgcaaactcatatttcgattctgcgcctactggattgggtaaagcgccaaattttgttgctgcttcaattatttttttagcatatggtttggtaagcttcacaacaatcacttttgattgcgcgttaacgataaatgccgcttccaatccttcaatctcatggcgattgattctatcgctgacttcttcactaaccttggctgaaatcgctaacgatactggcgcataaatcatccctcttaacacatctagtgattcatggccttgaacctgaccgccgcctgagtagttctcttgctttaagcgtttgatcgcacctctagctccaacgatacaccctatcccttcaggccctaacagcttgaaggtcgaaaaacaagcgagggttgcgccaaattgtgagccgattccctcagttttcaaagctgagtaattgtcatccgtcacaatcggtatttttttattcattgagcgaatatgtgagatcaattttttcagatcatacgaatcgtcaattttttgacgggttacttgaattaaaattccatcaactttgttttctcgaagtacctctgtcacactattaaaatcattgaaatccgcataaactaaatgtatacccagcatatcaatcgagacctgagtggttggatagaccggcgcatcatgaaccaggattgtttttcctgttccaacaaccgcatgtagtgcaagtctaatcgcattcgttcctgaaccacgtactagcatagccgcttcagcattgaaaaaatcagctaatactttttctactttgttggtcattcttggttgatttaattcttttactactccgagatctcctcgagtcaaaatttcgtcaccagaaaaataatgtgtaattgaatcaaccaatttaaattgcaaattcgtcgcttcttcgattgttaaacttttcaaaggaaatgcttccatagtgtcgatccactcctaattcataaatgtttgaggattatattgaagcatttttttgataaagtgttcagaaacacctgtttcaagtgctaatgggacaaacttatctaataagtaggaataaccaatcccaccctgatactccaaatttgatttccgtgtaatatccattgagagaaatactttatcgtcgtagcctcttttttcgatttcttttagcatggtcgctcgtaataaatctggttggtagttttctttcccaattgtgtcaaattcaacatacactccttggtccagcatatgcaagatgtaatcgaaatttcctgttaaatcaacgtgtccaatgacgattttttctaaatttgccttttgcgctttgaaaaattcaacctgttcatgcccataggttcctaaagtggtatgagtagtgattggaactccagtatgtttttgagcaatcactgaagcagtaaaaactttacgttcacgctcagtcatggtgtctttacttgttccaatctcaccaatgatttgcgctttaattgatgtatccgcaattcccgtttcgatttctttaatcatgaattctgtcaactgatcgacggttgcctctgttacgaattctggaagaaatttatcctgataaaatccagtcgcttgcacgacatttatccctgataaatcagcgactttttgaacatatttcggatttcttctcatatccatattcgtcacatcaacaatattacgcacgcctttaatatacatttttttgtattctgagacagtttcatcgaaacagtttaaattggtatcatcagtattttttaaccgtgataaatcaattgttgtgtgttcatgcatgtacgttattccatcaagtaacatctattttgactcctcctattttgtaacaacgggaacaaatagtccaactaggtacagaatatttacgattacacctaaactgattgctgcaattggtccaacagctaattctactactggcttcttcgcttttctatttagcagcatcaagccaatcacccaaaaatagccaattcctggtgcgatttgctccgaagccatggccccgccaactaataacgcaacctcgagaaccttattcatggctgtacggatgtgctcccccatttcgcgaattcctgggaatttatctagtgcttttgccattaagcttaatagttgaacttccacaaacatcaatagcgcgcccacaaggaatgcaacgataggatttccatgtaataaaatccctgctacaaatacaaatgttgtaccggcaggactatacacacctgtaacgattgctgtagagaatactaacggaatgaagccgatccctctagcaaaagctgctaatgctgcttcactcatttttccttctgaaagtaagctaagagaaatggggtctcctgcgataatcatcaagcttgttgaagcagcgactaaaccgccagtgatagaaagccatatccagtttttcttaattcgattcactcgttctaaaaaaacgctgacgaggctttcatttgagttgctgccatcactttttacttgaatagcataaacaatcataaagatcatgccaacaagtaatgacatcccttcagcgcttaacgttaacgtcgcgccttttcctaagtcaaatgtaccaaatctttttacaataaacaacgttaacaaggtcgcactaaatgaaatggccccttttttgaagccatgctgacttgcgatagccaccgcaggaaaaatactgaacccaatgacgactggagagcctacttgagaaagtgagtccataaagtttattggcatcattgcgaatagatcaaccactgcttgaagtcctagaactaagccgacaccgtatactgcaccaacacaagcagaaatgatcataccggtttttccttctggagcccacgaaccgatgatgtctgtcattagtaacacactatgcaccaaaagaattgatgcgccaattgaaacaggtattccaaatccaataaccaaaccaaagcttaatgcaaagctcgtagcagcgatttcttttttcccgatcttgccttctaaaaattctggtacgatcggtcgcaggccgtcattaaaaacagcaatgcctttattcgctaataccgcacacaaaccacccagtaacgcgattgcagctaattcaataatttttgacgaatccatcttctttcctccgttgtctttttattgttttttaagttcatccataatgattggaatcactatttctttatgttgcgctgtaaatccaaacgcttgttttccagaacgaacattctcacgaatctcttcttctggcatcaatttccccggcattgaaacggttacacaattgtcatgtcctagtaaagctaacgccatggctaacgcaccgccgcctcctgtattgcacgctccaacataataatcagcctgtccattttttaccgccattgctgcttccaaatcacttttgatgtcaatttcgtattgattatcaccaaatttttcaaccagctccttcacttctggcttgtcaatctgtccacctactacaatttttttcatgatagctcctcctaattgaatatacatttttttgtatattggtaagtaattaataattacaaaatgattgtaaccgtactcaccaacaaatgcaatccctttcttttagaaacaaagtgatcaaattgtctgaaacgatgtctttaacgcgcttcttaaaattttgctgaatcaactgtttggtgaaaacacaactggaaccgcacgtttgcagtcaagcaactaagtaatctctagcgatttttcacgatgtttactaggggatttctattttttagggctagcttgattataaaatttgcggaaacatatcctgaacgacttttagaatgtataataaaggtgatcgcgaggtgtagcatgtgtgtttagaaaaatataccaaaataattgaagaaatgtatacccaacaagaaagtgaatccatggacgataaagtagcaaattctgggattcgaaatattcgcatggctgccgttatcaacgattatctccagcgtatttcaggttcagaaattatcgtgactggcggattatctatcgaattttatactcgaggcggctacaacactcaagatattgacttcatcaccccggctgaaaaagaattggcgaaggttctggaagatttaggctttaaaaaagaggcaaaatattggattcatgaaaaattggaaatcgtcctcgaattggtagcgaatattcccttcgatggtatctataaggaacccttatcttataccactcaagatggatttaaaataaattttagcaatgtaaatgatatgctaattgatcgaatcagaggtttattgcattggggctacaaggattatggtaagtgggtattggaattgcttgagcttcattatgaagcactggattttgattatctaaatgaacagttgagcgatgaggaacgggaaattttggatcagtatgttgcactttatcaagatggaacctcattggaatttattaagtatgctataaaacaaaaacttgaagaaaaaaacatcatctattctgaatatgaaaagactaacttatattatcttgcatttcctttaaataaagaaattagtaaagacattggtccttactttggagtattattggaaccaaactttgatattctattgtataatgaagaaaaggaaacccttgaacctgaggataatctatctattattgatttgattaaggcctatggggagccttttagaactatttcaaaaatacttgaggaggtactaagcaatggttgacataaacacagaaaaaatactgaatacatccattcaagagcgtagagaacgctccgctgccttccttaccctcttgaaagtcaaaaagaacgaacacaagtcacgtgaccctaaaaaagcggaactgcttaaatcctttgaggataaacgtggcgggtttaagatagggaatatctaaaataaaaacgacgctcttctcctttttggtttgagaagagcgtcgttgcttttttgacttattgtgaaattaaagcttcatcttcattgaaccattcattgtttttttcgtcagtatctaatcttctgattggcaactctttagataatttttaaatgctcaaagtacgtctatttctctctgctaattcagtcgaaaatgggatctttccttgttctacaatttgattataaagcaatacaatcaccgtttgggatgtgtgacctaactcagcaattatttgttcagcgtcatgcttccatagcgtttgctaattgattattttatctcattcatatccaatttgggtttaggagtaatgatgctggtgaaaaatacctataagaatgtttttcgcttgtttgaataaaacttcctgaacttcccatttcatcaactccttatataataagaaataaaaaactagtctatattatacaaagcgatcattctttcaaaagaagtttgacaagctaacaaccattagctaaacttaagctaataaacattagccaaaaggagtgcagactatgagcagccttcctacaaaagaacgaatcatcgcagaagcctctcacctttttgcaaaaaagggctacgatgcggtcaatgtcgaagaaatcgcacaggcagtcggaattaaggcaccgtctttgtataagcattataagaacaaaaaggaaatattcgatgccgttgtacaagcaatgaatactcgttacgaaacaaatatggcggcgttgcagatgaatggacacgatggtgaaacagatgcggatgttttcgaaacgatgtctgaagaaaagcttgtggagattggcaataagctctttgctttctttttacatgatgattacgccgccaatttccgcaaactattgacgatcgaacagtttcaaaacagcgagctggccgcaatgttcacgaagcaatacgcagacgatccgctttcttatcaaggaatgctgttttcgatgctgacgcaagcaggtgtcatgcagccaaatgatcctaagattatggcgttgcaattttacgcgccgattcatttgctgctgacgatttgcgatcggcaaccagaaagagagccggaagcgttgataatgctggagcagcatattcgccaattcaatgaatgttatcgaacaggagcgaatgcccatggataaaaaaagaaacctaattcaatggctaggattatttggcatagttagcttcttatcctacatcgcagcgttggttttcagtccgcttgcttatcccggatacaactggatggcgcaggctgtcagtgacttaagcgcagataattcgccttccagaattttatggaaccagctctcttccctatctggcgtcggcagtgtcgtgtgtgtcatgctggtgtgcgtctatattcaagggagattgagcaaatccatacgcgtcgggatctacctgtttgcggtaatgatgtggttatccgcagtgggatataccatgtttcccttaactgacagtggttttgctggaaccttccaagatgtcatgcatgtcgtcgtgaccgtcttagtcgtggtcctttcgatcacgtccctactgactattacgattggcagctttcgtagtaatcactatcgttcattaggaatctgggccgctgctgcacttttacttatggtcaccggagccattggtatcaacgtagtgccaatccaatacttcggtatccctgaacggttcagtgtgattgcggcgatggggtttaatgcgtttttgggtgtttatttgtttcgaggatttggtggggagtgacttaataaaacagtgttctcaaataaaaattcatccttacgttgaagcggatatctcgtacacatcgcagagtaaattaaactaaacttgtgaaaaaaggcaagaaaatcgacgatcagattttcttgccctttattgttcatgggaagatttttaagtcagttgccttgtctgcttttcttctattttcttctttttaatgtcctttttccggcaacaaaaccgtacctctatcccactataataataaagaggtgatgacaatgtcagcagaatacaacttaggttcactagtaaacgcaggtaaatctatttctgaacaaaatattaaacggattattcaacattccaaaaaatatcagttgaaaccaagttttttaatcgctcaaatgtttatcgaaagtcattggggcgatcccaacatatccattgtcgggagtattgataacaattggagcggaatatctgaaccctttactgtcccttccgatttagaaatacgtatgcgccgaggaagtgcacgaccgtccaatgaaggcggctactatgttcattttgatactttggaggactatttcaacgcatatactttcttattatctgctagaaatggactttacaaagtcgaaggaaaaagtacgattgaagatttttgtaaaggtttgtttagagtcggcggcgcaaaagcagattatgccgcgagtgggtatcaatattacctaagtatgttagtgcctacctacaatgccattaaaaaacaaaatccgaataaattagaagccattgacactgcacaataacgaatgaaaggaatgaatttggtatgtttatttattatcaaccgcaggcatcaggaactgctaacgatatctacggtgtctggggcaacaaacgattccatttgaataatatggataaggttggtcattttaagaatatggtcaagggagcaacaggcagcgattgtaaagaataccattgggaacgaggcagtgagcagatcaaaacggtggaaagcttcactgaattgcagaaaacggtgatttaagagaagaattcaaaaaaccggaagcaagcaaaaccgaaagactcggttgtcacttgtttccggtttatttttcattagaatctttttctaatcaatcgaaaagcagaaagcatactgcctgatttaagctctatttcgtttttgcttgagtagggtatcgactattcatcgcttccacatactttctctgctcgatcataaaattgaccgcaaaaactgcgcacaatgcatacaggaagatatttgcctgctcagataaatttggcaataaaacatttggaagaatcataattagaaaggaagcaaaagcccaaatccaacgatgaattcgaatgcctgctttctttaaattatttaataaaaattgactcacagttaatacaatgaagaaaaatgcgaatacagcgatccagtacatcgtttcccacccttgtatattagagttagggttttaaccttccggttttgattggataaccctatgaaccatcgttattttaatttggtattaactcatttcttttgagataatatatttattggattgagaggctaagccgttccccccttgggtcattgaacccgcactcgagagactggctcctctctctgataagtggattgcgtatgagttagatgttgaaagtccttactttactccgtatctcgtacaaggtagtgacgcttttcagttgagtggatttcaatccaaaattctttttttgaaaggtcagatatacatgtactttttaggcattgatatcggtaaacgcactcacgttgcttctatcatgaacgaggaaggaaaggtattactaaaaggtttttcatttcctaacaccactgaaggagcagagtcattaattgagcgaatggtcgactattccggagcacccagtgactttgttatagggatggaagccacggggcactattggctgtccatcttttcataccttcacgaatcagattatttgattcacgttgtgaatccccttcaaacagacggatggcgtaaaggtacagaaatacggaaacgaaaaaacgatattattgattctgttttgattgctgacttaatgcgctatggctcatttgtcgaaacggtcttatccgatgaaaatgttttttctttgaaacaactttctcgttaccgaacttatttagtaggtacagcgagcgacttcaaaagaaaaattatagccgtattggatcaagtctttccagaatacgcgacgatttttaccaagcagggcgttttcggaaaagcttctaaagagttattgctggcgtttagtgccccgatcgacttagaaaacatttcctcagaaactttggcccaatacttagctgagttaagcaggaaccgaatcaaggcagaaaaagcggaccaattgaagcaagcagcttctaactcctttggagtaaaatttgctcaagaagcgttcaccttccaactacgttcaatgattgaacaattaaaattcattgaaagccaaataaaggaaacggaaagagaaatcaagcacataatggacactttaaattctgttattctcacaattcctggaattggtcctataaacggtgcgactattcttggtgagatcggagatattcaaaaattttctaacccgaaaaaactcgttgcttacgctgggatagacgcttccgtgacacaatcagggcaatatgaggcaacgcataatgttatgagtaaacgagggtctccatatttgcgaaaagccttgttttcggcggctttagtagcttctcaatgtgatcctgtttttagtgcgttttaccagaaaaaagtttccgaaggaaaacatcatctaactgccttaggtgcggtttctcgtaagctttgttacgtgattcatgctattttgactaaaaacgagccttatataattgtttctgattagctattgaacattcaaaaaaactaatggtaagaagcttatttgttgtacccttttttcggaattatctgttataaaatattttttgatttagctaatttttacttgactctatatagttagtctctcttttaaaacttattctgcagcgcttacttctacctgcgccatttcatcttggaccatcttcttgtcataggcttttacgaaaggatagtagataattccagcaacaagcaggttcacaacaatcaagactacaacgcgccaatcattcccggcactcaagaacccaccaattggagctggaagcgtccatgcctgatacgtcgtaaagccgttgacgatccccagcttaatagctgaataggaaattgtcgtcaatactaacggaactagattaaacggaatgaacatatatggattcaaaatcattggggctccgaacatcattggttcattgatattgaaaatcccaggaatcaaggtgaagcgtccgacttcttttagaaattttgatttacaaatgaacaggaataatgcggcaacaacgatggtcgcacctgctccaccaatcgtcactgtccattgataaaattgttctggtgcgatataaggaagctttgtagccgatgttcctgatgctaacgctttagcattgtcgtctaacatcactagccaaattgggcggataacagagccgacaatactcatcccgtgaatcccaaacgaccacaataaatggataaagaacattggcagtaaggcaccaaataagttgtttccaagtaatccagtaattggtttaaacattgccattaaagccgaattcacatcaaagccaatgatatcgcggatgatccacaatgtgatcaaaacgactgcccccggaatcaaggcttcaaacgaccgggcaactgctggtggtacttgttcgggcattttgatcgtgattttctttttggtgaaaaagcgataaatttcaacagaaaagatcattgctaagattcctgagaacatcccagaagctcccaatgatgccatcggtaaaacaaagcctaatggtgcgtcagcaggcgtggtcacattcacaggcatttgcagcatgaaaaatgcacctagcgacaataccccaccggttgttggatcgagcttgtaggatttggcaagatcagaccccatgataaaggtcgcatagatcgccatcaagcccatcgtcatccgaaatggcaaagcaatcgttgcgctatatggggctaataagtcagctaatggtttataaggaatatttacaaaaataagaaagaaactaccgattaaaatgagcgacaacgtcgacactacaccattacgaatggctaatagatgccgttgtgtccctagtttagacattggcggcacaagtttttcttcaataatcttcatgaatttatccatggtacttctccttttttaacaatagattgtttgtatcatttatttttatagaaatggttcttgtagtccttcacaagtttcgctgattgattcaactgagaaatgcttgattcgtaattccgactcacaaaatcataaaagataatatcaatagccataaactgtaatagtaaggaatccgtcgcagcaattcttcctggtaattcgatcggctggctcgtatgaatttccacatcacctagctcagagatggtattgctgccctttttagtcatcgtaatgattggaacctttcgttctttagcgatttgagctgcatatattgcttctggggtttctcctgaattgtctactacccacagggaatcctcaattccagcatttgctactatcggcaatagatcattcacattattaaaagcgataacaatagtgccaacacttccccacttttgggcaatgtcttgagctactagattagaaacaccgatacctaaaacaagtaaccgtcttgaacgagcaactatttggctaagctgatggatttgatcatcgtctatttcttcaaccgtttcagctaaagaattttgagtattcactagtaagcgttctttgatggagctgatttcttcattttcacgtacttctggctgtattttccgactaagttctcccccgcttaaatccgcggataattctattttaagctgcgggaaaccatagacttttaaccgcttacacaaacggataacagcggcactgctggaatcagctgctctggctaattgttgagcagtcatttccaacacatcctgcggttggtccaaaataaactgcgcgatttttaattctgattttgaaaacgcctcttgttgttcctgaattttggcaaaaatcggcatccttgttcctcccataatgttctatctttactaactgacctccttcaatctttcttttttctccccttttttagaaattcgatttcatttcttcacaaaacttgaaataaaatttcatttcagatacaatgtaaacgtatttttattccatgtcaagtattttggaggaaaaaatctatgcattatagaataggaatagacagcggtggaacagtcatcaccgctcaggcttactctgaaacaggagaattactggctgaaagaaaggctggaccaggaaatagtttggtcgatttcaagcagacgaaacaaaatattgagagcgttttaacagaattattcgataaattgccgatagctaattgtgagctaattttagctggtgtagccggtagtcaaagtgctggaaaccaaaaagaaatcgcagaatttattgaacgggcatttcatcgtccagcagtagtcttatccgatgctgaactggcaatgctgaaaggattacagggaacagacggaatcttggtcatcgctggaacaggttcgattgtcttaggccaattcaatcaaacagcctatcgagctggcggctggggacatttattaggggatcagggcagcgcctatgatttggtgcgtcaggcgtttaaaggaatgctgggagaagcggatcgtggaatcatcggtgatttaacaaaactaattttgccaataattggcgtagaaaatgtatttgaagctgttcagctgttcaatcgtcttcctcgcaatgatttggcggcttttggaaaagcatttgcagaacacggcactaaaaaccaagccttccaaaagattttaaagcgttgcggaaaatgtttaggccttcaggttttggcaatccttgatcaaataggtccgagcgcaaatcaaagtaaaattgctattacaggttccgttttaacaaacaatcaagtgctcaaagatagctttgaacaaacaatcaaacataactatcccgaagtggcgttgatccctttagttggtacaaatgcttctggggtactttattacaaaggagaataaaccatgacatttagacaattaggactttccatttatccagaccatagtgatttttcaaaagacaaagactatttagaactggggaaaaaatacggatattctcgacttttcatgagtatgcttgaagcggacgacatccttgccaccaaacaaaaattcagcaggatcattgctgtggcgaaggatttaggctatttaaccatcatcgatatctctcctcgcatctttgaaaaactggggatcagctatcaggatctgcgcttttttgcggaattaggcgtggatgggattcgtttagatcaaggctttgatggaaataccgaagcactgataagctataatccttatggactcatcatcgaattgaacatgagcaatgatgtcgcttaccttgagaatattttgagttatcaagccaataaaccatatttattcggctgtcacaatttttacccacaggtgggaactggcttaacagaagagtttttcctagagtgcagcgaacgatttaagaagaatggcattcataccgccgccttcgtagccagccaatatggagaacaaggtccttggaatgtgaatgatggcttgcctactttggaaagtgatcgttatttgccaatcgaggtacaggcaaaaaaattattcgccactggcctcattgatgatgtcatcattggaaatgcctatgctactgaagaggaattgaaggcactggcagaactagatcgttatcagcttcaattgaaggtggattttttagcggagacaacagaattggaacgaaaaatcgcttgtgagcagcagcattttcgccgtggcgatacgaatgcccttgtcgctcgctctacacagtcacgtgttatttataaaaacgaagcgaatcctcctcatgacaacgacatgacatttgaatttggcgatattttaatcggaaacgaccgctttggaatttacaaaaatgaattgcagatcgtattaacaccgcataaggatgaccgtaaaaataaaattggaagaatttcaaaagatgaaattgccctcatcaattatttgaacccgtggacgaaatttaaactggtgtgagtccttttcaaaatcaccaaaattaaactatccactaagttcagcactaaaaaagaagaagtatcgctgctggatacttcttctttgcctattctaatttgcactcgtctatcgtatctgagtcgcgcacttattgcaataaacactgagttctttttgaaagcgttcatcaacctgagttgttttgtgcttatccattaattggaacgttttttcccctaccaccatctccgcaatattagtatttccgcaataagggcattttaacttttcgtttttgaagcgttccgcataagagcgcgctctttttcgttcctccatgaatacgcgacatctattgattagctcaatctcttgatagttcagctctcttacttctagcttgtccgcatccgtcacatttgcgtatttagcatatttttctaaatttttctgtgctcgcactaaagaatcgaacatcattatactagcaatctgaagcactggtacgggtatcttatcttctggaaattgactaggatacaattcagttaaatggacataattctttcggttctgaagataagttcctgaaatgtagcctcccacttccgcctcataatgaatgccatacattcttttataatccaatttcaccaaccccttcttgataacgctccttttctttcgtggctcaaagaaattctcacaaaaaattaacgggatcatttatatgaacactgtaaccgaaaaatatttctcattaaatgatagcatttcgtttctttcttttggttctcaatattttttcttttatttagcattttgaataaatcaaagctgtgactgaaccatttacccacctctttcaatgtggtaacccctattgatcgaataaaaatgaacacattgtcatttttatgttgacacctaatgttcgcactgctatcatctaaagtgaacagtgtgtcatttatttttataggtagacataaggaggaagcagcatgccaaaagtgagtgaagattattttaagaaaaagagagacgaaattctggatgcggcttatcaggtagtgatggaaaagcctatttactccgtttcattacgggacattatccaaaaaagcgggttaagtcaaggtggcatttatcgctattattcaggattagatgatattttgatcgccctgatcaatcgtgaatgtccggcctgtgatatggagcaagaggtgaacgctattttgtctttagagcttatccctgaacaaacattggagcagctatttcggctttggcaaaatgaggtactgaaaaactatgtcggcgcaggaaaaatttattttgaggtcacaaatatgtatgctaacgatttggaacgtctggagcatttcagatctgaaaatcgtctaggagcacaggagacgatttttcaagaaaaatgtttcggctggttagcagaaaaaattcaagcaggttattttcaaccaaaaacgtccattgaagatcttctattatttatgggaactgcttttgatggaatgatacgggatttgatcttagctcgtcactacaaaatcggtgaagcctatgaaaatgcgatgcagcttgatcctgataaattggtgacaactttatacttatctaccgttctcctactgagcggcgatgtatcaaaacgaaaaaatggagggttatcaaatgaaaagtaatcaaagtggtttgaaggtctatttattgttggtattcttagttccgtatttattgtgggggattattctgctggcgcaggagcttggctggtttaattatggcgagtccttttctgttatccttgttgttcttgccgcaaattgtccggcaatcgctgccttttttgcattccgccgggagcaaaccgattattcactgaagaaatttgctaaatcatcttttgacatcaaacaaaagcctgtctattatggtctgcttgtgttattcgtagtgctattttttgcggtacctgctttgctgggaggcatcgcgactgaggttagcccattttctggtgggactgccgctgctgaacgcttccccatctggatgacgctactgatttctcccttattctttttcgttggcggatcagaagagcttggctggcgcaactatttacagccgacgcttgagaagaaattctctttcatccctgcaacacttattacctcgctgatttgggtcgcatggcatttgccactctttttgatcgtcggtacatcgcaaaattccagcaacttgctatccttctccttctacgccatcggtgcctcttttgcaatggcggctattcgtcgggtgacgaaaagcacgtggttgtgtgtcatgtttcactgtatgaccaatgcgatgcagggttcgttgccgctgatcgatgatttgttcatcaagctcgtaggagccatcgtattagtagctgctgcacttatcgtcattgcattccatcacacttggtctcaacgtcaattagctctggaaaaataatgctattcccaatacatcaactaaaaaaggtactgtggcaggattcttgtcacagtgcctttttccgacgctttataaaaatttgaaaaacaattttcgaaaattccttcttatttcttgaagctgaccacttctgtcacaacttcgcttttagctataaatttctactactttaacagactactgcagaatgtagccttttccccaataggtcttgattcttttgtctgtgtagttgcactcatctagttttcgattgatctttttggctaagttagatagctgtgattttcttgagcttgattcatcttctccccaaattaaccagcacatgtcctctctggcaattgtttttccttcctgcagattctcaaaaaacaattgctcttgcttgcttaattttcgattgaattcttctatcgaggttgccattaagtgttcatcatttttagtgtttaggatatccaaaagctccctaatttctacaaaagatcgatcaacatacaagacgtccaacttttcctttgatgcgggaatttgctgtccctcttcaacatttatgcgaataatttgcccatcaaataaagaagaggattccttcactatggttaagaattccttttccgataatgtttcgctcaaaaatagacaatcaaagacacttccgcaattagccaataaggagttattccgttcatttcttgtcacgaatacctcgtgatttaaaacctgtaattctcgttgtaattctaactcatgaaaaatatttttggtcagtactaatattctcatttctatccctccattaatcatctatcgatttcgttcattttttctaatttttttgtgtggatttatttcaattctattatgtttcatttccctaccttagaaacgtcattatcgattaaaaataataaattttgagtcttgatttactaaaaataaatgaaatcattctaaattagaaagtttatcaacgattaatttgctgatagcgagtcaaaagctacatttcttcttctattttcattgctgtttaagtgttgaaaactgttataaatattgatatatcaagtttttctgtcgatatgccatttgtcgtagtcatttttattcccatgacatgttctgtcttgcttgttccatttttgctgaaaaaaaatcttggcaagtaccacgttagtgatacttgccaagaaaattcgctgttaataaatactgattttcgttccgatttgaatatcaggcaggttcttttcttctacatataatgttcctggaagctctgcttctgcggcaccatcaaaacgcacggtgatatgccctaaatcgtctaaattcttcttaaccacatctccaacggctgtgatcttatacgtctgatcgttaaagccaaaggtcatgcctggcaaaatatcaccggttgaagcctttagctcaatgttgtagcaataatcagccagcgtctcaggagcttcatccccgaaaaaaatcagcattttttcagcctgaaacatctctgcctctggtccaatgttcgttacgtgcgtctcaaaaatcatcttttcatctctcccaacaactacttttacctctagtttaactgtacataccgaaacttgccagccacgctactaatacgcgaggcaccccatttaagaaacgggaatacaaaacggatggtactccgacttcaacagtttctgcttctgcttcctctagacctaaaccaaccggaataaagtctgcggcattttgcgtgttgatcgcaaacaatgctggtaacgccagctgcggcggaatattgcctttgccgatttctacaccaatcagagttcctagaatctgactgattactgctcctggtcctagtaatggtgacagaaatggcagcgagcagataaaaccgataatgatcaagccaatcacgttacctgccaatggcttcatcatattggcgaaaactgtgccaattcctgaaccttgaataatcccgattaacaatgatacgaaggccatgaaaggaatgaccgtattgatcatggtttgaactccttcacgagcagactggttgaaggtggcaactacttttccggctcccatgccaatcttagcgataaagctttgctgctctgctcgctgttccgtgatctttttatctgtagagtacttgaatttcttttcttcctttggcgcttcagtcggcgcaacgactgcttcactttcatcagctaacgtgatctgatctattccaactgcggacacatagatttcttctgtaatatattgtgccaatggaccgcttttacccgtcggtacaatgttgacagttggaatatttttctttggataaatcccgcaacgtaaggttccaccgcaatcaataatcgctaaggcaatttcatcatctgggatcgaagttttaaagccgttaactggctccataccactcagttcaacaattttgtcaacaattgccggtttttcaccgccgccggttacgtaaataaatttatgcttttcttctgtcggtgtaatgactaatggtccgccaaatccgccgttgcctttaacaatcttgatactcttgtaagtcattccttttcctcctctactctactgttcgtacgtctttactcagctcaatgccttgctgcttgcaaacaaaagctgtcgtaaagtctgtgacccagccgccaataaagttcataacaactcctaccagcatataacgaatcgctagttccattgaattcaagcctagtgccgtaatcccttgagcgatccccatccatacgaacagttcgccaggattaatatgaggaaaaactccgttgcttgtgtgacagaactgtgcttgcgacgcgtagtagcttggtttatagtactctggtaagaaacgagccatcgtaaaggacatcgggttccccagcatgaaggctgacagaaacggtaaaatcaaatagcgggtaaagggatttttagaagaagcctgcgcgacctttgttactcgttcttctcctagaaaggcaattagagtattcattgccaccattaatagtaagacaaccgggacgatccccgtcatccagctgataaatgtttcagcacctgtttggaaaaggcccatgaagccttctgcgaatttaattagaaaatccatttttatacactccttttagtaaattttgtctgaattgcttgttttagcatcgttactttcagccctacgttcatcgctggtgaaactggctgactttcttgataattgcccttttcaacttccaaatagactttttgcgcgttcatcgcggcttgacgagtcaatttattttccttcaataagactggatgatccgcagatagctcatgaatatccaagccgatgaattgcgggcgaggtttgaagcgagccaagattgatgttccttgcatcatctctgcctctccgatttttcctgtcgtatctacagcaaacaaaagaagtgtccctgaagcaatctttcccggtcgtctgccgatagccaccttgcctcttcttcgcatccgtccatataccatattgaaatttttaatttgctttaagcctaaaaatgtctgaacaatgtaagcaacaagagcaatagcgcctaaaaaaaagatattcatcttagacttcccctttcgttaatagctgtgtatattcttccttagaaacgacttcctttacctttttacgcaggctcggactggaagatatggtaaaaatggtatcgtagaaactcaacagctcgtcttcggcctccatcgttaaatcgactggaatagcgactaaaaagaccagctcaatttcttcgattgacggtttttcaggatacgaaccaataaaggcaataatctgatcactttgattattaataccatgaggaaacgcaatcccgttttcaatgaccgccgactcctcctgcgatttctgcaggatataggatttaaaggcgccatcgatccacttttcagcttcaagctgattcagcattagcaataagttctcttcatatgatttttgactgtccagtgtcttaaaattaaaatgaatgttctcaaatgaagccgcttttgatgcaataatccgcttccactcgcctaaaagccaattatcattaaaaagatccgtcagcttaatcagcgtcgtaggaacgctggttttatttagcggaatcgttgtaaaaatagcaaaatagcgattcaaatccttcgtttgatattcttcctctgaataatgagcgatccgaatattcggccccagtacattgcctagctgacgcttcagcatcaaagccgttccttttccggtattgcagacaatcgcaatttctttaaatttcccgctggtatctgccttaagtgctaactcataataaatggccaaataaggaatttctgcgctacactgcggcttgttcaaaacatctgccaacgcacgaataccgatctctgctaattcacaagcaaatgcgtgctttgtacgaaaatcacgtccaaagatatcagctgtctgtacgcgaaaaataattcgattaattaaaaacataaaatgagctcgcaaatttttaaatagctgatcttcatcaatagcgataatgactgactcgtgaatggtcgtcatcatgcttttaaacagctgatgaacaattgaattgtccgctacttcttcatccactatgttgttgttgaaaatattcaaaggaaagcacagaaagtcaaattcaaactggcttaaggtcacgctgtagctttcttcaatcgtcacccgcagctcttctacttgtgcatcatcactgaaataatttacgtaatacggaatcgcagtcggtaatgtatttccctcttgaatccgatccaaggttaaaccaatgacttttttccataagccggcagtgcgaaaatccagcttcttcgtgattgatatttcttcgattactaataaaatcgtctcacttaagctgagatattctaaataatcataggcatgatgcaagtacagcatccgcagatccgcttcttgtccttgcagcagcagtcctttgttaggggttccaattaatgaaatgttaaattcctgcagcagctgcttcaaattccgcaggtccttatttaccgttgaacgactgacccccagaagttctgacaaatcatcaatcatcacgtaatcctgtcgtttcataaaacaatcaattaagaccgccatgcgtttactgcttgaattaaaatccatctgttgctttaagctgccgttcatcactacctcaaattgctttgaatcaatcaccttcagctgataaacacctgagacttccacgattttccctacatgttccatttgctcatttagtaattgaatcgtctttttgactgtttgtgaagttgtattggtaatcagctctagctcctctagagttagtcgatcttgagtaataaaatgctgcaatacttgataccaacggttcaccaacgccatcatattaccccgctttcaccttagcctcttgttttaccacctgcgacattggttgtaacaccagtgatataacttgctcggtcagatagatagtagcatactagatctgccacttcacttaacttgccgcttcttcctaatggtattgtggtggttttactataattttgacgtaattcatcaacggtgattccgcgagtataagccaaggctgtttcatacgagagagttcgtaagcctgtttcctccatgatccctggagcaatcccgaccacacgtattccctgtttgcccagctccttcgcccatgaacgagtgtagctgttcactgcagccttggttgccgcataagcactttgaccttcagagccttccaatccgctttctgaagacatattgataatcacacctgatttcttttctaccatgattctagcaactgcttgactcattaaaaagaggcctttttgattaatcccgcaaattttgtcaaaaacatctacagatagttcaaattcgccatggggctgttttccatccactaataatcgtggtacattgatgcctgcattattgaccaacccatcaatggttccaaactcctttactacttttgctacatttgcctcgacctgttccttggatgaaatatctgtcgcaaaaaagcgaagattttcatgagtttgcttgccttccttaagatcaaagttcgctaccttcacaccaacctccagcaattccgtgacgatactcgctccaatacctgatgatccccctgtaacaatgaccgttttgcctgcaatgtctaaccaatctgtcataacacgttcctcctatttttaatacacccaaagtatagaacccttcattcacaaaattaatacggtctttttatgaacttcataaaaaaacgtgaactaattcaagagtgcctgaaaaggaggaagcacaactggcgctgtttttgtagaactttctaaggaacttaatttctacatcaaaaatagcacgcatagaaaatgatcaacatcttctatgcgtgctatttattatgtcttattccattattttttctctcttataatggcacttaagtcaaatccgccccatttgtggcaatgactcttttataccaatcaaaggaatcttttttcgaacgtttcaatgttccatgtccttcatcgtccaaatcaacgtatataaaaccatatcgtttagacatctgactcgtgcttgcgctgactagatcgatacagccccagggtgtatagcccattagctcgactccttcatcaatggcctgttccatttccttaatgtgatcacggagataatcaatgcggtatggatcatgtatagctccgtcttcttctacaacatctttcgcccctagaccattttcaacaatgaataagggaatttgataacgatcatacagcttatgcatggtgattcttagacccacaggatcaatctgccagccccagtcgctggcttttagataaggatttttcttagagcctagtaaattgcctcccacttcttctccatctttttcgtgggtagcaatactgctcatataataactgaaggacatataatcaaccgtgccttctcgcaaaattgcgtcatcgccgggttcttttttgattgtaagcttattatcgcggaaaaacttgttcatataactaggataatacccgcgaatttgaacgtccgaatagaatagattggtatgatcgctatcaatactttccatcacatccagcggattacaggtatctggataagcctccatgcgagccagcatgcagccgatcttggcatctggaatgatctcatgacacgccttcacagctagtgcgcttgcaacgaactgatgatgagccgcttgaaattgcgactgcaacatgttgtctgttttatcggccaaaatcccgccgcttaaatacccagtcattccgataatattgatctcattgaaggtcagccaatacttcaccttgtccttatatcggttgaaaagaacccgcgcatacttttcaaaagccgcgatcgtctcacgagactcccagccattttgtttgaaggctaattccaacggaaattcataatgtgaaatcgtaacaagcggttcaataccatatttcaacagctcatcaaaaacagcatcgtaaaaagccaatcccgcctcattcggctcactttcatcgccatttgggaaaattcgcggccaagaaatcgataatcgaaaggttttaaagcccatttcagcaaataaggcaatatcctctttgtagcgatgataaaaatcgatcccataccgtttaggataaatcccttccttatccgccatcgctgccttgacatccgcagtggtcattggcttggtgatgccatgcatatttgtaccattttctttaatataacgggctgtgtcagcggtcgaccaagctttgccgtcttctaaaaaagcgccttcaaattgattggccgccgttgctccgccccataaaaagtccttaggaaatccactcatgctcttcatccttccttttccattcaagtctattgtataattgttatacttgatttcctttatcttatcataagaatgccgaagcggattttcatgtgataggacctattttcattctgcattagctattttcacgtttatgaaaatgaacgatttgatttgattggagtgtgcctaaccttgtctaatatcttagactttttaacctacttaaatatccatggaaaagaaaccagctattctaagatcattatttacctattgactcattcagaagaggtacaatccttgacgatttctgaaattgccgataaatgctatgtctcgccggctacgctgacccgtttcagccgccattttgatttttcctcttttaatgaactgaggaaaaccttggctcatttggttggcatgccgccttacaacggcttacggatgaatgagcagcaataccagctgatccaaagaaacccgcaagcctatctggaaaactacagtgaggaaatcattacctcgatccaagacgtgctgaaaaccatcgatattcctgaaattgatcaactgctcaaaaaaatccatgaggctcccgaagttgtcttgatgggctatggtgctactttggagatcgctaaagaagtccagatgtccttactttccagcggaaaaattctctatcttggtgaaaccgaacccttgcaaaaggaactaattcaaggcttgaatcaggacgccttgatccttctcatttcttcttatggaacattgctgacgaaggaccctgaactgacgcgcttaattaataatagttccgctcagtcgatctttattacacaaaatacaaaaaatacacttacaaatttatttacccaaaccattcaggtcactagccaaaattatgtgcaaatcggaacctaccccttaactttctttttcgattacgtgatccgtcgatatgttagtctctttggacaaaaataatccagagaggcttttttaacgattatttcccgcgtttttgaacagcaatccaaacctcagattcttttttcatatccccatttggatagacctctaattgatattcagccggctcgtaggtcgttgttgggaaaaactctgaatatatttttgaccatatctcctgatcaatgaatccatccgcatcgggactttgaacttttaaccatgtacttctcggaatcgtcttcattacatagccttctggaatttcctcgccatcaaaaggagtcgcgatataatactgatagctcgctccatcatacgaagagccatccgccaaacctataagttccttattctgcgatgtggaataatctatcaattcctccaaagtcccatcctggttgcagcacttccaaaattcatctgcccgaacatttttgacaaattgtttttcgactttcccaagtaatcggaacgcttccattttttcgatttgaatttccaccttgttatcaccctttcctttatatcctaataatcctgattaaccgaatggcttttccgctataactttttttcctcaatccattttatcatcaatcgaatagaaaaaagatccaatcatctttactaatgattggaccaaagaatattttcagtttctaagctttattaataattataggaaaatgattcgtttaactcgttttcataattgttttattgctcttaaacttaaattttaaagacttaatgatataactgtgagcttattttgtcgcttcctcaatatagttcttcgctatcgcaatggcttctttggtgtctttactcttactgaacaagccgctgccgccaaggatgaatacttcagttcctacatcgtatagctgtttatagtatttttcattgcaacagccgtcgaccgctatttcatagtgatagccgtatttttctttccattcttttgcttcttttattttttctaaagtttcatcaatgaacgcttgcccagcaaaaccgggatcgacagtcatgatcaaaagccgatcaatatgcttggcatagggcaagatcaccgatagaggtgtagctggattaatgaaaatgccggtttttttacctctttgatgaatatgattaaatagtctaaaggccatcttttcaatgatctctggcggcatagtcacgatttcagcaccactatcaatacacaaatcaaccagatccacatctaaattatctacatataaatggacatcttgaggaacttttgaaattttgtttatctcagccataaagcaaggtgccagtgacatattttttacgtagtgccaatctaaaatatctacatggtaatagtctgattctggatctaaaattttgatttctttctcaatattcaatagatccatacacattaatgatggcgaaaattttaccttcatgcgttttctccttgttcttttattcttttgagctacatcttcagctaaagagtagacgaagattcttacgcaagcccttcaacgattggatgaatccctctcaaaatgaacagctcttttatttcgtctaactcttgggctgagagtatttgggcatcttccatcgaatacttccagcctaaatagttgtatttgttactaccgtattgatgaaatggcagcaaatggaccgtttcaatcctacattcatataaaaaatccataatttgattcaggttctccacacttgttgtgtgatccggaatgagagggacgcgtgcaatcaactcaacgttagaattagtagaagccattcgaaagttttctttgacgtaattgaggtttgcaccgatcgttttcttaagttgctcgttgtccataatttttagatcgaaaaggacttgatctaagtaaggaaataatttttctaaaactttgggtttcgtacagccagtagtttctagcgcagtgtgaatcccatgatccttcagctctctcaatagctcaaagatgaaatcatgctgaaccagtgcttctccaccagataatgttacgccaccagtcgaagtccgatagaacatttcatcctttaatacttcctctgtaacttcatcaacactcatccagttaccgataatttcttttttaccattctttagccattcaattggttgaacaggaccttgtgactctggattactacaccacggacaaaacaatggacagcctttcaaaaaaacaattgtccttattccgcttccatcatgaaccgaatatcgctgaatgttgaatatcaatcctttagtcactaaaacagcttcctttcttagagaacatgttccgcccgagcgatgatgtcgttttggattttttcgtttaaatcaacaaaaaatgcggagtagcccgctaccctgactactaaaccacggtaattctctggatttttttgtgcctcaagtagcgtttctcttgtttgaacattgaactgaatatgctgaatttttaatttcgtataagcacgcagaaaattggcgaatttttcgatcccttcttttcctttcaatgtgttaggctgaaacttcaaatttaacaagcttccattaaccatcaacatattgtctagcttgctgacagtttttaacactgcggttggtcctaagcgatctcgaccaaccattgccgataaaccgccatcagctaattgctcttgttttttccgtccatctggagttgcgccaactgcctcaccaagtggaatatgagcagaaactgtataggcaccgggattaaatttaccgcctcgaatattggtgtatttgtccaattccactgcgtaatgcttaaacatatcagctgctacaaaatcaatctcgtcattgtcattgccgtatttatcaaaatcattaatgacatgctcctgcagatcagcatattttccttcataattattctccatagcttcaagcatttcctcaaacgtaatttctttgttttcaaaaaccatttttttcaacacatacatcgaatcacttaaatttgcttgtccaattccttggatacctgagaagttgtagcgtgctccgccctctgttaaatctagtcctttttctaaacaatccatcactaacgaagataaaaatggtgttggcgcaaattctctatgacctaaatcaacgatatctgatcctcgagtgaccagctctacataataagaaatcctttccttcattcggcgataaagcttatcgtaagtaatcgtctcatcacccttgaagctatacattgtcaattccatcactcgtaagaaattgaacatcgcaatatcatgaagcccgtaggtacgaccaggtatcgtcacttcgacacagccgacaatcgcataatctcgtgcatcctctaatgaaacacctttacttagaaacgctggtacacacacttcatcgttgaataattgtggaattcctgttcccatacgaatcgtttcgcaggttttattcaaaaatttttgcggaatcaactcgttcattcttactgaaagatttggctgcggcattttcacatattcgtaagcctctaaaaaaagataggaaagctcattcactgctgaacgaccaaatgaatcaagtccgcccaatgcaatattgtagcctaccggaaaaccagcaaatgacttggcactttgctgacttcgtaaaataacaacatcatttgtcttaatgaagaaatcgatcaaatagctgaggatagtttcttttgtgtagccttcttcaatcgaatgctgataaagagtaaacaaatactgatccatccgacctaacgacatcgaagaagcattggattcatattgggcggcaatgctggttaaccaaacaagctgcaacccttcttggagattcgctggtttttctttgcttaatttggtacacatggatgaaataaccaaaagctcttctcttctttttcccgaagtttcttgttccgatattttttttgccaactctgcatatcttacacaatgtcgtgaaaaagcttcaaagacgatcaaggcggcgattaaaaactcattttcaggattatctgcgattttctcctttaaaattttgcaatattcaccaattccataccttaaaatagttggaaaatccaaaataatgtgaccttgccctttgtccgtttggttcaagctgacgacttcctcatcaatcgacttttggatatcacgatcaatttttttcatgataaaatccttcatggatttcccttgccaataggagtacagctcttcacgataaattttcttgttctcttcagaaaaatgaaattgatcctgaggacgtgtatcgattgtatctatctccttcaaaatccaatacgggtccatttcaggtgaaacgataccgcttcttggtttcactgtccgattgccagctaacagttctccttcacgaatcgaaattgctacgttgtctaaaatatgtgctaccgcttttgctcgttttaaaatcacactcatgccagctgtctgcttatagctttctgtatacagcagcgctctttctaaagaaatttctcttgttggattcaacatgtcgttttttagagttttaattctgtccaaatcaatactattaaagttgcactgtaaggtgtttatcattcatctctaactccctttcctgctaaatcggatatttattgataagttttagaatgatagccagtacaccttttttagacatactggctattttcgttacataatttcgatatctaaatcaatatcctcatcggctgtttggattgcttgttcttctgcacttggcacctttttaagcacgcccatgagtactgcgccgatcatgcttcctactacaatagctaatacataagcaaaaggattattcactactggcgctacaattaagccaccccatggagccggatttcctgcccccaaaagtgccgcgataactgcacctgttccgccaccaacaaccaatgaaggaattactcggaatggatctgtcgccgcgaaaggaatggctccttccgaaatacttacaaaacccataatcaatgaagctttcccggcttcacgttcttcaggtgtaaatttctttttgaaaattaatgttgataatccgcaagctatcgctggaatcgcgcaagatacgccaacagctgccataatcattaatgatgattccgtcggcaacccagtagctggatcaatgttggataacatcgctgtaccaaagccataggaaactttgccaatcggtcctcccatatcgatattattcattgctcctaatacaaatgctaatacaacgatatttcctgtacccataccttctaaaaaaccagttaagctcttcataagcgcggctattggttcaccaataataaacagaacaattcctgaaacaattaagctaccaattaacggaatgataaatattggcatgacggatctgagaacggatggtaccttgattttcttcaaatagaaaacaacaatcccggcaagcagccccgagattaatccgccaataaaaccagcaccgatactgttcgcaagataccctccaataattcccggcgccaaagcagcacgatcactaattgaaaaagcaataaatccggacaaaataggtaccataagtcctaatccagcaacaccgatttgagcaatcttacctagtgccccagcatctggtacagccgtttcaccgctcagcaatactgaaacagcaagaattacaccaccagttacaacaaaaggaatcatgtatgaaacacctgtcattaggtgcttttttgtatcctttaaaatcttcactaaatcgttcatcttaatacccctttacttttttttgggagtgaaaagttgtatacttatgtcaaatgttttttgttaaaagagatgagcctttgtggagaaggcttatttcttttatccaagttttgcttgcaactttttcacaattgcgcctgctttgttgatacaatctcctgcactgaccctgactactggtttaccaataaatctttcttcatttttgattccgatattattggttaaaataacggcatctgctgcgccaatctgctctgaagacaattcattctcgataccgatggagccctgtgtttcaacgtgaatctccacaccattttccttagcagccacttccaagctttctgctgccaaatacgtgtgtgctacgcccgaaggacatgctgttactgcaactaatttcatcattttcctctccttttttattattaagcgacaaccgccgctaaggtcccgtttagtaaattcacaatttcttctttcgtctttgcattttgaagcgtttctctaaaatcttgatgaatcagttttcgcgataaactagcaataatttttaaatgctgatctcctttgcattcctctgggacagccaaaagaaatactaacccaacctcttgcccgtctaggctttgccaatcaagataattcgtcaatcgcccaaaagcaaccgttgtttctttcacatgtggacatttaccatgtggaatcgcgattccaaaacctataccagttgttgttaattcttctcgttcaataacactttttaaataaccatcaccatcatataatctgccagcagcttcaattctattagataaaactctgattgcgccaagtttatcctctgcctcaatattcaaatcaatcaaattttccgtaatgacctttgtcatagttatcctcctaaaattttgcggtaaatttcttctggacgcgttttattaaagaaaaattttacgttttcttcggatttcactaatttatgaatatccgtgataacccctttaaccaactttttttcgtccttcgagatgcaaataagcaaaatataattaactctcttattgtcccaaacaatgccacgattcaaagtcaaaatgaaaaccttagacttcaaaacattctgcggcgctgcatggggaattgccacacctgtatctagagccgtttcccccagtttttccctttcaaaaacctcgtttcgaaattctgtgctaactatattattttttttaagaatatcaatcatataatctaaacaagaatccttattttcaaaaaattgatttgtaaatatatattctctatcgatgacctttttaagaaatggaaatgtttccgcctttggtttagtcgctttactttcttcattaaaaaagaaatccgaataaaggatggaaatgttcttgatgtcttcttgcgtaatcagtggagaaactttgatgattggtttttcaattttatctaaattgacagatgaaataattaaatcgacgctgtctaaatcactttgataaagattttgaatcgtggtaacttctgctgtatcttgagctggcaacacacgcttaattcggctataaatcaattcagaagtacctacaccagttggacaaacaatcagtattttcttcccatgctgacttttttcaagtgacacttgaaaatacatcgccaaaaatgcgacctcatcatcattaaagtggactcccaactcgctttccacatttcccatcgcataccaggttgaactgaagatgatagcatattgactttttatttcagctaacagtggattggttgtttcgattcccatctttagtcggtaaatcattggaataaaatgctgcgagaaatgttctttcaaggccgtatctttggaaaaatctacatgcatgatctcgctcatatttcgaatgattttattaattataggttcatatttcttgtaggtttgttctgtagatgtttccagcttaatgccataacctactaactgacgattaatataagatagatcctgatcgtcaaaatctacctgtattttcttcgagattgcttccattatttcattcgctaaaaaataggtatcaagagactggatctggtcaaacaggaattccttttttgaaagaatatgctttcctaagcctaatctgaagaagaagacaattaaacttataataattgattttctatattgtcccggaatcgtgtaatcagagaatctctcaatccgatcaatttcatggaaaacagcctccacaatctgtactgaaaaaagacctgataaaaattcttgcccgtttgtatccaataattgttcactgccaaagcctttaatgtttaagtaattttcacaaaatcggaaaaggcttcgttgaatttcctcctcactcccttcgatataagtaccccttttcgaagaaacgactgttactgggtagctttcatccactttttctaaatcattagaaattgaactactactcacgtgaaatttatctgctaatttttgatgtgtcacggttttcccatcgacaagcaacatcctgctaatctcaaattgccgttcaacgggctcaagataaatagattcatgaacatcctcgtccagaatttccaacaaagacattttctctgtgacacttccaagtaacttgattccactccttggccttctatcgatgctgactttaataggaagctttgttagctcctcttgtattttttctaggtccgaatagattgtacgatttgacttagaaagtctcgtcgcataaaaagatattgctaaatactcatcattttgaacaagtaatcgaatcaatttcttctgtcttgtattcattccctccataattattcctccaaattgtaagcgcttatcaactttagttaaatatatcacatggctttttctatgtataacacatcctgcttccgtattaatgtcgcaattattattcatagcgaacactcgtataatacaatctcacagttaaagcatattagttttacgttttataaaaccaagttatcgttgttttataaaataattttagtccgacgatattttcatatcctaatcttatctaactaaaaacatttatatctacaagactcattctttacctcaattttgaaaaagaaaagaatcccgatacgcacctatccagattcttctcttatttatcatgttttcctacacccttagatcacttttgaaaagaatagtggatttacctttagattcaaaaatgacacaatgccattaccagaatcaaaaaaagtataatgctctttatcatgataaaagcttatggttctttcttcacttgttttttcaattataatctctcgaacatcacaaggataaatttctctttctctcactttatataagccccgatgcctgcttattccaatgatccctttctcgtactccacctcagcaaaataataatcttctccgttccggtcaataaccttaacataagtattcataacccttcctcctatttttttcttgagtatacgctatgatacccgtttcataggaagcggtttgcttagcttctttgttctcattgtaaaaacagtaaaaaatggaagccatcatcttcttttatactgatattaaaaagtctatggcttcaatagaacgcttaggattctcgacaatccaaaaaccccaagtaaagtttccctctacctagggtgtgtaagtcaaaaaattttctaatcctataaagtaattctctgaaaattttctcctaatatttcatttttaacgtctatgttcgctggtttgttcctcttcaacattctttggcagtaatcgggcgtattttcgctcccgaacctcatttataaaggtgatcactcgcacccaatcaggcaggtactgtttttcactccattggaacaggtaagggacatctgatgaaaaatattttgacagatcaatcgcataatcggaaataatcacatcaggttcctcattgattcgcaccatgattattggccgcggactcaagcgcacaagcttttgcttctgcaaggcttcttcaattccccgtccttttgattctatcgccacacgaatcggtatatcgtaatccattagaatgtaatacaacaactgagaagtgtagtatttgaacgagttcgatttcaaagcttcggtccattctggattgtcagtttttactttaggtgcaatatcgtctaaaacggcgaacaaataatggtattcttcctccatctctgacacggataggtaatccccaaaggaatcaatttgattactaagtccaaaagaaagcagaaataaaatacataggtggcatttacgaacaagtatttcttttcattttctccaaattgaaacttcagctgactttctaccaacgagatccaatcgtcaattaggcgacgataatcactcaaaaacatcggtgattgcaattggattttctgcatcgaatcaattggatagctttgacctatcgtaaacatgtaataaagatacagtaattcatccttggttaaatccttagaaaaaagaaaattcgcctcaaaaaacggtaataaaagcttctcttcaaaggcccccttcgccatgaacggattgtagaattttctcaccgaatccggtacttcagaaatcacgtgcccttgctttatccgcgtgaccgatactgctaaaagattaatgaaacgttcctttgccgcatgtcggataaatggaaaataagcggttattttttgataaatctctgaagcactcttttccgtgatcggtggccggttgctttcaatttcatcgaacacgtgccagtaaaaactatgaaaaaagtaacgaatacgatattcttccccttctaaatgatcgtttttcttcagatttaatccgatcttataacgatccagaatcgggccaaaagcggctatttgacgttggactgtgcggcggctcaaataatttttctggctgaaggcatctaacgacgtaaacttttgatagaaaaccgcattccagataatgaatggcaccgtttctttggtcagattcacacgaatcttgttcaataaaaatttttctgagaaagtaatcgttactgtacgacttcctcgatctatagaaaactcaggatagccggcttgaatggcttctacctgatctaacgcatgttttaacattggatatgtaatatccaattcatcgatcaattccttgtagctaaatgaattttgataggatcgataatagtataaaaaaagctgctgtactagttgatcttgtcctttgataaaagaatctagcactgatattcctccttttcccctgataaattttagaatatatcaccttttttcacccgactcaatctatctgcttcactgtgtaaaaaaatagacaaaacactttgaggtttaaaagaaactttaaaaactcgttggctgtctatcttttttgtacgaataaatacccttgaatgagtctcattgacgaaatattctctgattttagtgagaaaaaagacgattcgcttcttgatgtctattattttgttaaaaagtgcaaggaatgcggcggcgtgtttaatatgtttattccgcatttttccttgaaataggttttgaaatcattttgagcaattgttaatatttcttcctctgaaaaaatagatgctccttctgaatctgcgatgctgcacatttcaattaagatccatatttccgattccagtccattgatttgtgctaaatgttgaaaaaagtttcttccatcaattgaagcaattctattttttaactctgcacaattctgcagaatacgctccttgacctgaggaaaccttatttcaaatgactgttcatttgctttttcaataaaatagtacaaatagtcgtctatattgttaatttgaagtgtttgctttaacatcttcttccctcctttttctgatttagccaaggaagacgtgtgtttagcagccttccttgaccaaatgcgtcacacttaaactgttttccaacgaatgccttctcctcataattgttactgaaccaaacgctatattttttcttgcacttacccttgagactcctattgttcttctgaaatttcatccctttgtctaggcacatgcagttcttcaagctctagaggcatcgtttctttgactaattgttccattttttcctgcagctcttcatacattgttagcactgcttctttggaatcatccatttcacttaacattttgttcgcatgacgactcatacccttcagctctacttttgcggaggcaatgatttgttctgcctttagctgtgcttcttcgatcgtttgacttgcctgttttctggcagaaagcaggacctcgccgatttcctgctgagcctgagtgacttcttgcttcaagcgttcattttgcgaagttaggtcagcgattttttcctgcagttcaacatacaaatcgttctcacctgtttgagcggaattctctgtttcgatttgttgtctcagctcatacaattcgtgggattgctgcgctaattgttcctgctgctcttgaaaggcttgttcttttccctcatatttttcctgtagctgaactgtttctctagtcgccttcactaattgggtagtcaaagcgtctttttcatcattaagctgctcgattttaccgctcaattgctcagcctcatccgtccgatcctgcaacaaacactttgtttccattagttctttgacttgatcatcattttgcttcaattgttcatggagctgctgaatttcagcgtgtgcgtttaccaaagcttcattcaaagtatttttttcttcttttagctgtgtaaatgtctgctgggtgttctcgaaggtttgttgaagttcctccactcttttttttagctcaattagttcatgctctttcatttcgcaggctgctgtcagttcgtcatttgattcttgtatcttcgtatttcgtcgcgttatttctgctattttttgttgcagcatttcttgcttcaccgtcaaattttgattgacagcattagcattctcgtattctttttgcaaacgctccatctgcgtggtttgttttaccagttctgacagcacgcgttctcgttgactttgaatttcatccaatttggttaaaacagcggtttgctcattcaataattcgtctttttcagccaaccagatttgtttttcttcctttaattgattaactgtcactgtgattttttctacctgttcgttcagagcttcattcgcacgttgaagcgacagctcgtttttgtcctgtccttctgttgcttcttctttttttactgaagccttcaaaacttcgattttctgatgcagctcagtcaattgagcttgatactgttgattctcttcgactaactgtgtcttttctgcttgaagctttgctgtttgcgcttcctgctcttggcctccttcatttgaagtcctcatttgtttttctttcatcgttagttccgtttgcaggtgttgcttttctgtttgcaactgttgaatggtttgctgcagctctgcaagagattcttgttgttctgttacttgatctgttcctcttgcgtcttcttcaggaaacaaatcctctgatacattattgatttcatcaataatatttttggtaaaaaaccaaccgtcattcttttttgccacgattatccttttcctttctgatcacttgatgtgttctctatttttgaaaatttctggtcatcctttttgcgtaaaaacgtttcattataaactgttttgtctttttcctccgcggtaactaagacttctatatgaatttgtgtcagcttaggaatcgtcttagcttcatttataaaggtgttcacgttggcttcaatcattttttgattgtcttcattttctgtatttccagtcagtgaaagactcaacgtttgagagggtacgtcgatggaaacaatcgcttgtgccaatccaaaatacggcgccagcttttgtgacagctccgtttcaatttttggctgcagtgactcctgctggttctcgtcgaagaccttctcccaagccatgctctctagtcccaacccttcttccggataggaacgcagcggtacttttgaaattagcatcttttgttcgtttttcaccctttgtacaacttcttctacttgaacaacgcgttgctgcgtttttgctaattgatcttccattcgaaaataagagatcattaacagcaacaacgctgtggcaagcaaccagctgattaccagcagaaatacagtgttcttttgacttgccagctgctgtacaattcgtaattttcgacggaattcttgagaatgctgcgggtctttttcaacttttgttaattgaaaatgcacaaacaaacgtggcaccaaaaccccaaataccatcacaatcattacgacaccaatgacatttataacaaacacgaggcgtcctcctttttctagcatcaaggaaaaatacttttcagcactccctcgatttgtgtctttttaacataaccaaatctacggctatcctgtgaaacgtcggtgttatcgcctagcataaaatagcagttaggcggaattcttgtttttccagccagttcagctgcaattgactcactcaactcaaggcgaagagtcgactgaaaggtgccctttccgcctaaatcaaggatcagcgtctgcttctgtacaagaattgaatcaccgggaatacctacgattcgtttgacaaacattcccggttcctttgaaacggagaaggccacaacggaataccgttgaaccttctgcgttttttcaatcaccacttgggcaccatcgtggattgtcggctccatagagctgccagaaacaggatggataatatacctcgtatggaaaaatcccagagtagctagaccaaggaaagcaaggatcagtattagtctttttttgactttcttctttttactctctggtgtactagcaaactttgaatctaccgcctgttccttcccaagatctgcggtctgctgattcaagttattttgcttcaatataggtcaccagctgtgaacgagccaagctatttggaatgatgcgataagaaatgatcgttcctcctaccacatttccttcagaaatcaagattccttcatcggtaacagcctctacaaaggcaacatgcccatagcgaggatcagatccggctgtcccaggactaaaggagattaaccatcctgcttttggtgtttgactcgtttgataccctaagcgtttggccgaggcgccccactccccgccatttcccatataatcatctactcgtttgcccaattgagcgacacgattatacgcataccaggtacattgtccgacgggataagaacccgaaagattataatttttcccgtcgtaatctgggtaagtcattttctcacgataagccgccgggatggtttcttttccttgcatgactgcacttgtttgggttccagtcactttattttccggaatcggcaggtcgtattgggtaaggtgataaacggcaatcaatgaactgattttgcgattgtagcttgtatcggtcgcgtattttcctgttaatgcacttgcagatcgtagatagtttttcgcctgtgagcgccaaacatcttgataatactcttcgtttccttgaatgccgcctcgaataagagtcacataatcccccaacgattctgcgtagctaggataacgtctgaaagccgcctgaatagtatacatatcgccatttcctcgatcttcctgagtcgaaaaattcaccgaagcgccttcgtagctccctttaacaccaaataaattatagttaggagctgccgctaaggtactcgtacctgatccgctttccaagattgcctgagcgatcatcactgaggcaaacacatcataatcgagtcccagcttttgagccgattttgcaattgtttcaatgaaggcttgggtttgctcgttttctgtaaagtccatggatgctggataagctttttctacttccttgccataggtggttaaggtgctgttgcttaaacgctgtacctgcagtgtttgctccaagtctttctggtcagaaaaaagagcaatttttccgattttatgatcggcctgttctggattttccgttttttctttgtcactcggatcacctgcaactaagtaatggtcgccgcctaaatacaaaccaaacaattgatcatccttataaagcaaatctcccggctgttttttttcattggcaatacttactttttgagctgtctttgccgattcgccaaagagattttttgtgatcagatgaagtaactcttctgttgtcttaaaggtctgacctgtcttatctgcttctgcagtcgttacttggtacctgccaacctgtcttatcccttcataaaccagaactgctttgcttttgtcttcaaaggcttttaaaagtggtaattcaaagccctttaaatcagattctgaaacatcacttacacgtagggattcatccaaggtaacctcatctaattgtgaaaggacagccgcagtttgtgtagccgccgcagcggtatctccggttcctgccgttggcgcagattgtgcagtcgtcgcaggagctggttgtttttcagctgttatctgattttcgttatttctattgttttcttgacttgcttgcgtacttccggcagatgtctctttagaagttgacggcgcactttgttccttactaggtgtggtactggtagacggcttcgaggttgttgaagaagctgtcggttttgtactagaaggtaccgtgctggattctgattgcccgccgctagactctgtactagaacttgctggttgctcagaagatgttgccgtattctccgaagtcattgacgacgaactagaaacacttgatgattcagcggctgactcgcttggtacagtcgccgactcctgaagctgttcagaactcgtaacagaattttctgcggatattttttcatttgctgaggattcagtcgaagtgattgttgtttcagaggttaattcatccgcagcctgtaatggttgcccaaaggtactatgtaaaagcaagacactcaaacatgctgcgcaaattttccaaatgctttttttcatgtaatccaccttctttgtttttttctatagttagttgtttattggtttttttcagtgacaattcaattttctcttttgagtaaccagcctcaacgcagaagattgaaaaacagaatcggcagcatgaagaatagaaacatcggtaaaatcgtctgtaatggttccttcacaaatctcgcagctacagccatcgcgaagctttgaaaggctgagactggatttttcttcaccatttttccatctgatttctttgttgtttgctttaatcctatggaagacagctctcctgcgttcatttcttgaacaggctctatcgtttgcagattcgcctgaacgacacgacgatagatcgttccaatattcccctcacagcgcaacagcgtcagcttaggctgtgtacctggtttgtttttctcgatgaaagagacttccgattccttgacaactttatttaatgagaccgtatagacataaacgtccttaaaatctgtggtatagattttgtctcctgttttcaaaaatttaattcggtgaagcaagacatcctgttcgtaaatgttgtgggcgagtaaaacataattgtctctgcctaattgctgctcctggcgaaaggtcgcagctcctgtcaacaagttctgattggccagtcctgctaaaattggcaggtcaatcgattgatcaggaattaccagtttaccgatgccccaattattggttgattgctgaagcgcactcttcgcagacgcataatctgcaacgttcacactagctatttgtcgttcctcataattggcgcgttgaattttgctcaaattgtaatcactaagtgtctcctctacccctacatctgccgcttcgaccacggtatcgtgctgcatttggagatagccataaaaagcgatggctaagattgtcagcatactgacaaatatcaatgcaaaatacgtcttggtcacaaggaacaaccgcttcagattttttcgccctcgttcggagattttaggatcagctgaacgaaatcgttttagccagaagcgataaatcactataagaatcaagaaaagcacaatattgattcctagagtccctaaaacgatattctgataactccataaattccgctttatgacctttttcgctatggcatccttataaggaatccgatgtcctgtaaccaatagtcgataggtattgatcccaggcggcgtacaggtaagcagcgtcacttgatctttccccggtgtgatttttactttttcaacctcattgggtaagatttcttcaaatgaatcgatttgatacgctaagcgtttgcctaatatattgataaagaacagatcaccctccgtgaggttgcgcacatctgtaaaaaggacttgatttttaacaccgctatgaccagtgatgactgagcgggtatttttcccgccaatcggaatggatgttggttcaaaatgtcctaatcctttatctaatgttttgtaggaggtaccgtgataaaacggcatctctttgatatcaattgctggaatgtcgatcgtccccataacacccgaacgatttttcaaaatacttttatatactgcaggctcaggattttttccttgctgcttttcaaaaatgtagtgattgtacttctttgctaattcgtattgcgtgtttttctctgtctcagtcatttcctctagggttcgatcgtaagctgtttctgcttgacttcgttcccgattagctaaataattcccaacgattggataaaggaggaccaaaaagcccgcggtaatcattgttactgcaaacaccatcaagaaggaatgcttctttttcttgttttttttcttcatggcagctcctctcccatcgctttactcactgagtggttcctgtttttcccctcagctcttatgtatgattgcttaaaaacgtttgtttcaataaccttttctaaaaaagcagggggtagtttttttaggactaccccgtgcaacaatccttttaaaatttatgatgttttgtcttgagaacctttaccccgatcgctcccatcacaacgataaacgccaagataagataaagcggctgggcgtttccaatacttccacttgtttgcgggagtttgtctgaagccgtctgggtacccgtattgacactgtcttcatttacagtctcttctgaaggacccaccacacttgatttcggatacaggtaaacttcacttaatgcctcaccttctcgttgcggtaaaggcaattctagaatgaccggttccatcacagaatttagtaaactattttctttttcaaccacctgatacgtaccgctcgctaacccatcaactcgcgctaatccgttttgatcagtggtcacggttacgctaaaggcatccgtcccttccaccggagcaaacgctgattctccttgaacgggtgatacccgagtaatttcataggaaataccggctaaaggctctaaggcatttccgtttttatcggtgaccttttctgccttggttccatctaagggcagctctgtcgaaagagctgctgcctcactcaatttgtatttcaaaatagagatcgcgtaaccattggtaggagtcgatgcgttctccacagcttgcgagtgtaacggacctgctcctactcccagcaagaacaggagcgtgaaaaagatgagtatacgttttttcattttcttacgctcctttctttctaggctgacgatagtagtgatacaaagcgccaagtcctgctaaacctaaagcactagcaatacctaagagccaaaccatcggtccattgccgccagcatgtggcagctctgtcgttttttcattgtcctgataaaccatgaccgtctgattggcttcagcgagcgtgacctttatcggtgtttttatcagctcatagcctttaggtgctttggtttccaccaagttgtaatctcccagtgccaagccggtaaaattcaagtaaccatttgcatcagtggttgctgttccaatcttttcagtttgatcgttgcccttataaagatcgaaggtcgcacttgctaaaggcgttccggtacttttttctgtatcactgagtgagccgtctgaatccgcatctacggcactgccggcttcatatttgaacagacggatactagaaagacggatcaaaccaatattgacatctgttacatggtgagtagcattagttaaattcttatctgtagctaagtccgatagtttgggctgtgtgtactcgtcggtcttgaaggtatcttgatctgccttagaatttaatgtcggatcatctcccactagaggctctgttacagaaaatttcttctgaactacctgatcacctacaacaaattcagcaatgtattctccttcagccaagtttgagaataggtatttcccattggcatctgtcttaatcaaagaatttcctgaatcatcaacaaatttctcgccagttaagctttcttttaccaattcattcttgtagttttcatcatctaaactggtccgataaagcttgacaggaatatcttttacaaatggttctgcagtatcgatcaaaccatccgaatcatcgtcataccacgccactccagaaaggtctcttccgtaaaccttcgtttcgaagttttgtgaacgaaccatcatatctaaatgagaattaaatctcacattattcaccaagatatctccaggtttctgatcagacgggtccaaagtgacagacaaagtgatcgtttttccgacaggtaatgaatccgatttgactaaaaaggctttcgctttagaaatatccgaagttcctgctgtataaagtgtccaattatcaatatcattaggatccgcctcttcatcggccgcttctgttgtgaaatagatttctgcatcttcatcatcaacgtcgacatctgtgacggtatagcttccatggaagatggtgcctcttgaatcgccattatatggaagtacatcaacgattcttacatccgtaacaggttgtgcggattcatttttagtggtcatttcatacgtgattgcatccttcgttccaactggcttgtcatcacctacttcaatcgtcttcttatttcccgttttactgacgataatttgctgaatcagattttctttgaacgtatctgaggatgagcgaatcgctgcaactgcttcatccttcactgcagtattgcccgatcgccacatttcacccactgtggaaaccgttaaatttcctgtaaatccgctagaatcaaagcttagctctgaaaaatccgatgttgccttgaaattcacttctacgcctgttgctaatggcatatccgagaaattccatcgaagggtggtcgacccatttgcattgttggtaatcgtgggttctggtaagtcatctcctttagcatccttactggaattagctttgtaatggattccttttggtaacgtggtggtcaaagcgccatcatactttacggaactagttccagtcagcgttcctgttacctttattggaatcgtctctgatgtatcgtaaagctctttctcgacttctgtttttgttaaaatactaaagggatttacataggcagactctccgatcgtgcagacataggacattggataagaggttgccttcccattggcatcaaagatcgttggcaaatattttccattattgagccatcctggtgaatctctaactggatcatatataatcccaccattattatctttaaactgcatggtactcaacaataccaaaggatttcctgctggtgttttatttcccggctgcatttgaataactttcagcgggactctttgcatgcccttccagcctgttggtattgaggtttttgcgtaacaggcaacagcggaaatttttccgccgcttgcttcagctgcttctggtgttgaataccagttgtacaatgtttctgtattagtgaacgactgaacctgcatggttgccggtggcgagttcgaaaaattcttcgctaccccatacatgaatttcacagtatctgattcagcgtgtgaataagtctttctagatttgtcatattcaagtgcactagggtcccacatcagcatagaatctatttcatagaccgcctcgttggtagttcctacaaaattgaatccaacgatagaatcgccagaagacagtctcgcattgccggtattgactgcaggtgaaggttcatttaaatctaggttagtcagattactggttatatcctctgggtcactcgtttttccgaataccggacctcccgtataggctcctgatggtgtcacgatgttcggataactgatactggcattatttgtagtcgttagaccatcatatgagaccgaatctacatagaaagtcatatcataacgattccagttattcgaacgagccagtgattctgtttgggtacgatcccagcccataattaattccagactagaaaaggttttcgctgcactgcttgagattctagtaccagtcatgttataggtatacggatttacaaccccagcataattcttgttcgtcacattcccgttgctggtaacttcaaagtcgccagattcatataccccgatctcagcaagatttccttcaggttgagaggaatagatttttccggtactcgcgttaggcgctgccagaggattcgtgaatacattagtatttaccgtttcagtatttttggtaaaggacgccgttcgagaataagttgccggcgcatatgcattaactgaataattagcatattgagacgaggttaaattattcgtcgttgcacttccgttcacttgatacgtccctttttgtttgatagtgtaagtgatcggaccactaggaaaagttgttccacgataatctcctgctgctctgccatctaatggtcgtaatacagtgatcgctgcaacatcataagcatccagattggcattgctgcctccaaataccactgttcctttttttctatctccttgaaccaattgaatcgctaccgatggttttgcagacaccgttgtctcaggtactgtgaactctgaatcgtacgtagtattgattgcttcaatgtttcctgtttctgcattttcggcgtccaaaacttctaattcaaacgttggctttaattcagtcccatgcttagcgtcaaaaacatttacaacaacgggaacaaagacttgtcccgtatcactgatagtagattccatgatcccctcggaatactgtgtgccatcatttatcgcatgatcataatacgttccgttggcaatctccccattgacttgcggaaccccattcccatcctttgtcactgcgttggacaatgttgccttcaaacgataacgaatatttgtataatcctgatcctgcgtgctattttgaatagtaaaggaaacaagataaataacttgatcatatgaacgaacaattgtattcgtatcgtttgaatcgtgtccaggagcatcatcaccatcaaaagtcgctgttcctgtctttaagctaattcttccttctcccatttgaatgggatcatcgtcagctaatactgtcgcctctgatgtatcagaactaaaatagacaggtttatttaacgaatcttctggcgcataattagcagcggtcaactccttcaagcttttctttgtcacttcggttggaacgctgatcacttctgcatttgctgtttctttagtagcgttgccatcatcagcttttaatgtagaagtgtgtggaattgcccaaataaccaacaagacaagcacaaccggaaacagaacggcgacaagtttattcaatttaagtttgttcatgtcttaagtcacctcattctttccatcagaacctctcttagttggcttggcgttttttatcaatcactactgccgcagtaccgattgtgattgcgccgattgcaatgacaatcaataaggtcgttccgacgccccctgtaaatggtagatctgtttttgtttcattgacgatggttgcttcaattgttgaatcattttcactcgccaaattaacagtaactttttgaggcgcttttaataattcgtagccatcaggtgcttttgtttcaactacccagtaatcacgtttgatttgatcttcagtaaatgttggttcagttccaatatcctgttgaccatcgccatctgtgtctgtaaaccagttcaactctaatccgttaaattccgttagcccctgtgcatccgaagttgctttcaacagcgtcgttcctgctggcaatgctggtgtagtcgtaccgtcattatttagcgtatatgtttttccatctgaagctaagaacttattagctttcgcatcgtcttcactgattgcaaggtggaattctgcccctgctaataattttgcttcatcttctgctgtctttttaatatcaaaaccacctgtgtagtattcaggatcttcttctggcggtgaaggaacttcgactggctctaatcctggactcaagtagtcaacatccatatgattgagaatcgtaccattgaaatctttgtccgtatgtgtttcaaagacaacttgaatctttgtattgtttccagtagctactttcttcatccccgcagtggtcaagttaaccacaactgctttttcattcgtagaagaatcagtgatcgggtgagcggttttagaagcaccgtttaaagtaaccgtgtaatctgttcctaaagtaagagctgtccaattacctgtttccgtcttaacatttaccgtaaggccgtcaagcatgattgcttcgttcaacgtatcgcgaatcgtatagtaatcggcatagatttcttctcctgctgaaacaggcttatctgcgatttgattgccatccttgtcgtagactggtgtaataaccatgtcttgagaagctacttgatacaagccacttggcaaactagcatttgcttcccaggtgaagtgatttccagctttattcgagaagccttttccttcttcgactgttttatcaggctcaagtaatgattccatgatgttcttaggctgtacctgaacgtcataaatcaatgagccgagatcatcacgatctgtttgcggaacttgaacaaagaacggatccgcaggttttgcgactgttggagacacgccacgatcatcttctaattcagtaaccagataaatcccatctgccgcattccccgtgcctaattctgctttgatcgagccgtcagctccagtggtaactgtttgagcagtaaatgaagaatcgattgtataatctgttccttccttttgaactaaaggatttgtcaacgcagcatctccaattggtgttactcgttgaatacggaacttgatccctgctaatggtgttttcgttactgtatcgtctttttcaccgtctccgcgttctcccagctcagataaatccttcacctgatatttccaaagtgtaatagaacgctttgaggtattatccgcaacaggattcgtcgtagcagcgtaaacagaaaaagaaccaactacaggagccacaactcctgcagtagtaaataatgtagtcgccacgacaaattttgtaattatttttttattgcctttcacattcataacctactttctttttacaaaccgtaagtaactttgcttttgactatccaacaaaccaactgcactcctttttattgatgcatggccttcctcctcaaaaatatataatctttcttccaagtcattattgattattttgaggcctaaaaaacgtcataatcgtctatgattgttacgctttgaggcttatttagtaaaaacgccacgtttatttttctattattttttcttaacatttcggctagttttataaataaacattggattaaataaggtttttcttcaaaaactgtcgttttctctcatcaaaaaagtcagtgatagaagggtcgttttttagattcacaagataggggttattattagacagcgattctctgctgataatttttattattatttcaatggttatttaatcaagagtcacaaatcaggacgatttttatttttttggcgtatttcacataaataaactttatttcgagacgatatgtttacttttttataaaataaacttcttagtccaaggggaagcactcaaaaaaaccatccatggcgtgttgatcatacatagatggttttactttcccttccctatttcaacatccgtgcagcaaatgcaaaaactattttcgaatatgctaaactaaaaaaagtaatccttgtgcgagtttagcggatggattaactgttcaatcatttttctcaatgaggtgatcaaaatgagtatgcaagtgagcttctttgtaaaagaccaaccagagggctgctactttgagaaaatcgaagcaagcttttttgaaatagaaaaagtgatcgagacctattatcccaatgagcagtttgatgcgattttagatgatgccctcctgcaaatcctacgcactgtcttagatagtttagaaaaaattggagaagtcgaagagtatctgcaatttctagattttaagatcgagaacatctatgattctgcatttgtcagcaagcattttcttttatataaaaatccagaggttgaggccttgatggagcatgtcttgttggaggttgcggagccgttagcagaaggttatttcgaatccatgattgattatttagaaacatcgatggacgatgaagtgtttgtggattttcgtttaaatggtgaggaattactgctggaggttcaaagtaaagggcaaaaattcagtcaaacagagcccttaaagcaattactaatcgactacgatgaatcgtttcaacgagtcgcaacagaatttttagaaagttttatttagttcaatgaaccgataatccatcagaagggagatatgacaaaagtcttgtcatatctccctttctcgaacaagcggtattacagaagcagcttgttcgaaaaatgagccgaaatttcttgaagctgaccacttctagtacaagtccttttcttggataggcagaattctttggattcagtaatttcccctttatacttttgataacaagaatcctaaaggagagatttccatgcaaaaaaggttaaaatccctttttagtatcatttttttattaagcaatctatttattcagctaggttcaaccaacgtttatgcagcagaaaacctggatgcttcacaatttgttacaagcgtggctcttgctgatgcaaacagccccatcggaaccaatagaattcgcgatacttcttctgttcaagtgacctataatttaaatttgggaaatggcagcgccatcactacagaccagccttacaccatgtctttacctaaagaactgaattacacaacgacaacaccaatcagcatcaatacaccaactggcgtgcatttggcggatgttaccatcagcaatggcatcatttcaatccagtttacttctgatgctcaatcctatgacaatttaagaattaattttaatttttgggctaccttcaatcgcagtcagttaaattatgaaactggaaatgatctggcctttccgacacagaccaatccaaacaacacggttcacttaaatttttcaaaaagcagctcaggcggcggctctggcacaagtgcaatcgccaagagcttatcctacgaggatacagaccccacaattatcaattggacactaacggtcaataatggcggctacccagtcgaaaatgcaacacttcaggatattatggagaacaatcaggactatattcctggatcgatgacagtcattcatcgaaattggcgccgaactcctttagctactgaacatactgagccagttattacgcaacaggcagacgggacgcagaccttcagtcttagctttgggaaattgaccagtgtgcaggaacaaaataatacagctacgacttctttagtcatccattatcaaacgcggctattatataatgcagccaataatcgatatcacaacaccgcatctacttatgataacggaagttttatcgataccgctgtttccaccgctacttatcatggccaaggcggcggcggtgaaggtgatcagctgattaccatttcgggaacgaaaatttgggaggtcgaagagaatgattcccaaacacgaccggaaactatctccgtctcgttgctacgagatggcgtaaactatcgccaaacaactatctcagaaagccaggacggaacgtggagctacgcctttccttcagtaccaaaatacgacaatactggaagagaatatggctattctgtgcaagaaacgactgtcccagaaggatatagcagcgaggtaaaaggatttgacatcatcaatcactatccggcaaaaacgaccgaattctctggacaaaaaaactggcgggatcaaaacaaccaagatggcaaacgtccggatcaaattaccgtcaatctgctggccaacggcgcctttcaggaaagtcaaacggtcacgagtcaagacgattggcactaccaattcaccaacctgcctaaatttttaaatggacgggaaatcgagtatagcgtctccgaaaacgccgtgcctgattatgtcactactattgaagggagtacaattaccaacacccacacacctgaagttcgagccattaatgttcaaaaggtctgggacgatcaaaatgatcaggataaattaagaccggaagctgttacgttagcacttctagctaacggagaaaaaatcgacgaagcttctgtttctggcgccgatcaatgggcccacacatgggaagggcttccgaaaaatgacaagggacaagcaattaactatacaatagaggaagaaacggcagtacctggttatacctctactgtgtctaaacaaaatgacgatagctttatcgttaccaatacccattcaccagaacaaacctccgttaaggggcacaaaaactggcaagacaataacgatcgtgataaaaaaagacccaacagcatcaccgtcctactgttagcaaatggcgagcaggtggcgactaaacaagttaccgctaatgataattgggactatgaattcactgacttgccaaaaaatctaaatggtcaaccaatcgtttacacagtcaatgaagagcccgtctctggatattcaagtcaggtggagggctttaatataacgaacacatataaagaagtcccgactattccatcagtaaatgtcactcaacaatggaatgataacaacgatcgagaaaaggatcgcccctcttctgttaaggtacagctttacgatcgcgataaaaaacatggagacccggtaattttaaatgatggtaatcattggagccattcttggaaaaatcttccaaaacaggacgccaatgtaaacaagacgaactataccgttaaagccatcgacgtcccaaaaaattaccattcaacagttgttgaacaggcaccctttgattttgttatcgtgaacacgcacataaataatacaagcaaagcagctaaagcttatccgaatactggagagaaaagttcgaccgcaataacgattttgggaatgacttttctattaggcgtccttttagttcacctgcgtagaagatttttcgtcaaggacgaacgataatctaacagtccaactccaagaaaaaaaaggccatctatgagtcacggtttattcgccaaaaggagctgccaaaaaggttaaaagacttttagggcagctcctttttttattatgtagtattgctccctcaggcaggaacgtcttgtgtatataagtcttcacttagtgtgtctagccgaactaaatatcgttttgcgtcctttttcgaaacgattacaaaggttcgttgataaatactcaacacttctccttcaacatagtcgccgtggacacttactgcttttaacttcattccaatacataatttcatcatactctcaaccttttctttttatactttcagttaacaacgtttcctcactgattattaactaaaataaaggcaaaaaaatgacagaatgatttacaaataataacagtagtgtcgcgttcaataaaaggaattctctgattccttaaaacatctgttgttatttttagttttatgtttatcgtattctgacccgcttcagaaaaactgctgatatttcctaataacaagagattctttcttcgctgctttttctcgttgtttatcctttatcaaatatttcttatagttgaaaatattgctggtgtttgtttcgctatgacagattacccgctaaaagaagtgaacaaatcgtctgtttacaaataaaatatgccgtttttcattttaatcagcgccatctaagctcaaaatatcttacaacgtgacaaacaacttaagttattttatatatcctgagagtgcctcactcctctactatagccaaaatagaaaaataaaaacaggatcaagagtcttctattttttagttagttattctttttattttcggcgagctattaatgaggaacgattcgtataaaatatgtatcattttaccctttcttgatcctgacgtcatgcgcttccaaagtaaaaataagtttttttatcctcattcattcttaggctagaccaccgttcgttccctatacaataggctctatttatattataatggaagtaatgttaaaaataattttaacgaaaatgctttttatggaaattatttttagaataaatataagtggagggagattatggagtttcgaacattgcaaacgtttcaagtcgttgctgaggaattgaattttactaaagccgcaatcaaattgaattattcacagccaacagtcacgaagcatatacgcagcttagaagaacatctagggaccattttattagagaaacgcaggggaaaatatgtattgacctacgcaggagaacagttatataaacgtgcaatcaacatactaagagaagtgaatctgatcgaaggaattcctagcgaatatggaaagaattatctaatccagctacagggacacgattactattgctttcgctattttttaccggccattcgtcaaataagcaaaaaaaatccgactctatcttttcagctgcatggttctagtaacgaagaaacaatcagtcagttgttaaaaaatgagatcgatataggaattatttcaggcaatatcgcatcttctgatttgaattatgaaacgatcgattatgaaagcgttgtcttgtgtatcaatacaaaatattatcgttctaatttccagctggaggattattttgaacgttatccaatcgttgtggatcaatctgaatattataactaccacaactcctttaagcaatcacttaacacaccgcaaatcatcgattcaacaagtgatgaagtggtgcaagaagccgtcttgaacaatagcatgctgggcatcgttcgagcaggaagaattcgacatttgattgattcaaaacaaatttcgatcatcaaagagctttcgacaaatgaacctgttaatgtggtaatcaataaagcaagcagcaaccatgaaagtattcaaaatttgtattcgcttatctgtcagcaaagtcaggcccactcaaagaccgccaaagtccaatggatctgatttcttattaaatgatttaaaaagattggggaatctttttaaacaacaaaaagccgctttgttttgagacaaagcggctactttcatggttttatagccactttcttactcccgaaaaagtgattgagcactcacgatgttcctgacttggatactacgatccttacagttgcgggtacagcgttggactttcaccaacttccatcaagtcataacgactattacgcactcaattgtattaaactaccatcattttagcatagaagcttcttattgagaagcagtagcactagaaattaactcttcatttaacagcggatagcctaatgaagcttctagtagcttcaaggcttcatcgggatatttacatgctaatactcccaatgaggacataatataatcatgatcaatcaaaactttcggaatacctgttggcagcaattttgtatccgaatcttccttgcgaatgttcttcaaaatgtctggaccattcttcaatcgtgtcaatgcgcctccggttccaatgacatagcgaatattcgacagatccttcccttgggctaacgtgtctcttccagaaggcccataaacatagcgtagagcaccaacatgccgatctaccgccgtcttcacggctacttcggtcaatcgttcgataaatgctctttcttctttattcttaggaatcgagtgatactcccgacgcagcttttccaggttatgtccttctttgacaagctgctcttcaccaacaatctcgatgacatgctccatattgacaaacatgcccaaatctccttcaaccgttcttttagctactggctcaggagcaacttgaatttttgaaatagcatcggttccctcggtgacagaataaacatctgttgttgcgccacccacatcgacgactaagacatctccgattttttcatagattagctggcttaaattcattaccgccgctggagttggtgtaatggtttcatttaccagatcgtgaatatgctccattccgggcgcgtggatgatatgcttttcaaaggcattttgaatcaccctgcgtgtcggctcgacattcaactcgtcaatcttaggaaaaacattttcaacaatgtacagctcctgttgactattttcaaaaatcagtttgatctcttcattgttttcaacattacccgcataaatcacgggaatcgaaagacctaagtcaacgattttttctgcattgtctaatgccgtttcacgttcgccataatcaactccgcctgcaatcaaaataatatttggcgaagcatccgcgatttttttcatgtctgttcgccgtaattttcctgcggtcaccatatggacaattgctcctgctcccagcgccgcttctttggccgcacgtgcagtcatatcaaaaaccaacccatgaacagtcatttttagcccgccggccgcactggatgtggcgaacatctcgtcataggatagatgatccacctccagctgttcctgcagatccttgatgctgttctctagaccgattcgaacatcaccctctaacaccgttgttgcagcctgtccttgtcctaaaaagacaggctgcgctccgtggataccttgaaaagcattaaccacggttgtcgtggacccgatctctgctactaagatatcaattttcattagacttcttctctttccatttctttcctgagctctactaacgctgttgcaacatttgctccattacttcctcgaccaaagccagcgtccattccattttcaacagcgatctctggaataacttgggttcctccagccatgatcatgattttttcacgaacgcctttttcaattgctaattcgtgaatccgtttcatgttacggtaatgaatatcatcatgactgataatcgttgaagctaggattgcgtcggcgtttaattcgattgccgcatccactattttttcaactggtacactcgtccctaagtaatgaacttccattccgtatttttcaattccgccgtgtttgatgtcgatgatttcacgcaatcctacagaatgttcatcttcgcctactgttcctgcaacaatcaccatttttttgcgttttacttcttcgcgaatttcatcgtccgacaatgtttttggttcttcaggaatgactaaagtggctttatcaatcgtaaatggtacccggccttttagctcgattcgtgttccttcggcggcctgcatcacttccttgttgatcacttcgcaatcgaccagacccatcttcttcccaatttctagcgccgcaaattctgccacacgttttgattctggaagcatcattgttagtaggataatcccatcgccctgccattctgcttctggtttgatcaattccttttctcgaagctctttgttttcttctaaacgaacattgacgttgtcattttcatccagttcgtcgataaaaataattttctccggtttttcaaaagtagagccgccaattagactcgcaggatcatctaccgcgccctcatcgtattgagcgacgttgttataaccgtaatgagcggtaacgggcgctaaataatcttcatctcgttcataaactgtattttctccaacaccgccattaattttgcgagaaattccgtcctcatttcgctctggataatttccagaatccacgaagaaagcatcttcaactgcttggaagtagccgcctgcttcaatgattccttcaaagaacaggaccgctctttctttgatttcacgagctgtttctcgtaacgggccatcatcaagcagcttcaccatatcaccaaagccatctaaaccttggaaaacctgtttcgcggtatcaacagcttcgatattgtaaatatgccaaggaacattgcgaccctcatctggcgtaatagttgattgaatatcggcactggttaattttgagatcaatagattcagtacatgagtcaccgtagcttcacgggttgaggcctccatgtattttgtattctgctgcgcacgcatccgatagtcgctgaaaaattcccgcaaagcaacagcatacggcaagtctaggtacattgatggtgctggtggtgccgttggtggaacggtggacaagcagatgtctgatttttccattccgactttatgggagaagatcgaattaatcgcgtgctggaccatcagctcaggcataaccttccaggcttcgcgtgccgtagcattcgcgttatgcgccccgtcaatttgggctattcctgcccaagccatcacctttttcgattcacaggcatcgacaaacgaacgaatcatattaatattgcgatacaatacattgtattgcggatcttggtgagcgccgttgactccttcttcggcgaacattaccgcaacctctggaccagcgattcctgaaacgtagctatgataattaattggacggcctacttcgtcttcaatcgcatccaacgcttttctttgcgctcgaacttgttttcgcgtaattggaataccgccgattccttgcggtgtgccctcaatcagcccttcaaaatgggactgacctgccgtacgaatcaccatcagatgatcggcaccatgccatgcggccatccgcattctgcgaatatcatcttcaaaacgacctgaagctatttccgttgtaattgaagaggttccttgaggatcaatattgtcaaaatattttgcagacggtaagggaacatatttttttaaggattccgccatgtcatggtattcaaagctgtgcatcttgtagcgtggaactggcgtacgccacgaccagccgcgacgtcttggacgataattggctaaatcatccaaaatttcgtgtatatctaactttttattttcatcaagcttcatctcttttgacatcttagtttgcctccttgaagatacgatctacttgttcccatagttcgccatcggctagttttaatccggcatctcggacgctcagaccattttctttggcgattcgataaacgatgtgtccggctcctttgcccatcagctcatgcgacagcacacgtttaacaatttctgttgcttcaattgatgagaagcccattcgtaataagacggaacgttcaattgacggcgaggtgtattttttccccatgtctagcatcggttcaacgacctcttctgctagttgccaaaaacgtgccttcaattcctcatcgcttaaatcagctaaatgctttctcgcatcctcaaattttatattttccaattccgtcacctcttagttcaaatttttaatgatttgttggacctgctcaacagttccattgatctcttctgccaagtacttcagttcaacttcagataatggctgatcagtcgttttcagtacattcttcaccagtgattgcttcagataagccaaatcaatgtcgttcactgagattttttccggtgaagaaggtaagatgatcgattttcctgggatctcctctgctggatcgccaaagcgaacatcgatcccattttctcgtgcaaaggatagctgcggctgaacactcttgccagcgccggtatattccgtttcctgaactaaaataatttgatcctcccgcatctcttgcgccaagacaaaggcggcagctaaggaagtatttcctgctggacccttttctaatccttccaagttggctaaagcttcggtgataaagaacacttcaccctgacgaattttcacgtaacgatccatgtaacgcagtggacgggcggccgagcgcggaacatctgaacgatctggtgaagtcgtaaaaggtacaccaaagccggtatgtccagtcgtaaatgatttccgattaaaatctacatctgatgccatgtgcagtccctgcaaatcgacactggcgccaacaattttcgtctctgtatttcccgctttgcgcattccccgagcagtaccagtcaagtttccgccgcccgcatttgtagccacaacgatgtctggctgctgaccaagctggctaaactgctggacgatttcatagcctaatgtctcaacacctgcgattccaaagggtgtatataaggaggcattgaagaagccggttttttcaattagttttaggaattgataaaataattccggtccaactgtcagctggacaacctccgcacctaatgcttcacatttgcgagccttttcaacgatttctggctgtccgacaccctttgaatcaaagcattcctgaacaacaatacacttcaagccgagttttgcggcatgacaagcgactgctgcaccgtagtttccgctagttgcggtcaccacaccttcgtagcctaatttcttggcatgatacaccgagatggccgcgcgtcgatccttgaagcttcctgaagcattagccgcttcatcctttacaaaaatccgcgcaccgtttccttgtggcgcatattttctggcgagcttggttaaattcttcagctcgacaattggcgtattccccacacctaacgagcgttgaatctcaatcatttcttccatcgaataggcagcctctgacatcattttttcgtaatcaaaggctacaccttctagctcaaattcttcataattgatttgcaatgaggcctccatcagctctccgcgacgtgccatgacggcttgataactgtcgtctctcactaatctgcacctccaaataattcttttctcagcatctgatcaatctcgacgatttctggaacaaaatttccgaagctatgattaaatgtcggatcaacctgtaccaatcgcccaatttccatccgaccggtgacggttttgatcgttacttcttctccgatattgccatcctcttgtaaaaaacccttgacccacatttccagcgggacttttttggtgctatctggtacttgcgatgcccgttcattcgtctttaacacaactgaatgaatctgcacccaacttccgctttttatcatcttttctaccctttcctgtctcttaaacgatttttgcctcttcatggatttgatctctaaaatctcctaaaatcgcatgaggaatcggcaagtcaatcatgctgactaagcctggacgcgcattgattgtttggggaatcatattgacacacatggcgatcgttccaactccgccttcaatttctggtgaattcactagattaacctgaggatttccatcaataatgacataatcccccgtttggacacctacctgctctggttcgatctgttgcggatgatccatggcgatcagctctttgccgtccttgattccgcttgccttcatggaaacaccagcaaccgcgcctgcttttgcttcgccgtatggagccacacgatcaacatccgttacgatcgcatccatggattgtttaacggtgtctagctcaacacccaaagccttcgcaatcattagcatcgattctgggaagccgacgtgccccgctaaggtaccatctttcttcccttgttcaaattcttctacagaaataccgatcccttgctcctccattaccgcttttccaaatggagagagggaatttacacgacgagaagtgatatgtttgatatcctcgcaagcccccgtcattaccagtaccaatacatccataatcaatcccggattgatgcctgttcccagaattgacacgccattttctttggctagtttatctaattgctctgctaacgctggattttgtgccattggaaaggccatttcctcagcgctggtgatgacattgatcttgtttttgacgatttttttaattttatcgaaggcctttactgtaaaggaatctgtacatagcagaacaatatccgctgctttttctgtaatcgcatcctctgccgtactaatttttatattttcattgttaggaaattcctctcccaacacttcaaagattggttttccgatcttatcgccgatatcaatcgcgccaacaacatcgacaccctttttcttcattagcatttttgccatgccgcttcccatggcacccattccccaaataatgacttttacgtttttcaagttgaatcctcctaagtaattttttattctactgatgatttgtctggtgcttcttctttgttctttcttttcattcctgcccatatggtgcttccaacaaacaaggcaataaagaccggtgcgcctgttgtcagcgcgcctcgctgagtcggatcaaggagcatccctgtagccactaaaatacataagatgactaacaaaattgggacgactggaaacagtggaatcttaaattttaaatctgccactgtattgcctttcgctaaaaaggcctttcggtgcttcaaagcgcagactccggtaatcgaataaaccaccaattctgctgctccgataaacgatgtcaaaaataaatacacaacatctggcgaaatgaagcttgatgccaccgcaaatacggcgaaaatcatcgtcacgatcaaggcattgatcggcactttgcgtttattcactgtttttacgaaaccaggagcctgttcaaagtgccccattgaccatagagtacgaacggcagcaaaaacatgggcgttcgctgaagacagtgctgaggtaacaacaaccagattcacgatcatttctgctgaagaaataccaagctttccaaatacgtaggcaaacgggctgcccatcaagtccgcttcacgccaaggcagaaccgcaactagaacaaacaatgtcaaggcgtagctgataatgatacttaaagagctaatcttgattgctcgaggcagattcttttcaggattttcactttcaccggcagctgtcgcaaacatatctgcgccgctataagcaaaaaccgcagtcatcatcgacatcatgattggacgaaagcctgtcggaaatagtccgccgtcattggtgtaattcgctaagcccacaccatttccaccaacacctaaaatcatccctaaaccaaccagcacgaaaacaacgattaggatcactttgatactgctgaagaagaacgaagaggaaccatactcttcattggagcgcgaatttaagaaaaatagcagcagaccaaagccgatgatccagacaattgatggtacctgtggaataatatttttcataataatcgctgaagccacaatctgtgttggaacagtaaccgctagctgcagccattttacccatccaacagtaaagcctgcgccatagcctaaaaactgggtcgcataggcctgaacattaccggcaacaggcatttgtaccagcatttctcccatacttaacatcatgagaaccatgatcagcgccccaaaggcataggctataaaggttccaccgggcccagattgctggacaacataaccagttcccagaaacaatcctgttccaatcgttccgcctacgctcaacatcgcaacgtgatgaatcttcatccctcgctttaacgaagctgaatctgttgattggttctcctgctgttctttgagtgacattctttttcctcctttaatttatgaactcttttttgatgtatttgctcgtaaatgtgcttaataccgatccataggagactgaaaattcaatctcatctcccacctgatactctctctcactctgtgttagatctaacagcagatgatcggagctggctcctaagatttcgatttgcgaatctttcggcgtaatatcatccaatgcaatatcctgttggccaatcgccactataccccgtagcatctttcccttatcaacgtagtgaggctttttaccaaaggcatccacgccaatctcgccaatcggataggagggcttttgctttacttcgacaatttctgtcaccaaagtaaagacgtcttgatgcattacttgataatcggcgccataagccgtttctcttcctaatacaaagctttcaccaattctcaaattattgatcccgctaggaagctgatcctctggtgaatccagcagatacagtgagctagaattgccgccagaaatcatctctaaagacaaatcaaaccgttccttgatttcttcttggatagcgaccaaatttccaagatttttcgaactaggtatgatggcgccgtaacaggtcaaattcacggctagaccataaatttgaatgtttttcagcttcatgacttcacgaatacagtcaaacagctcttccttttcaaaaaagccttcccgcaaatcacccaggtctaccattaagacaattttgtgcagcttcttttgcttctgtgcctcgcaatcaagcagctggatcgtttttaactccgaattaaaactaatatccgcgtattggatcacttcaggaacttcactgatcatcggtatccgaatcaaaatcttctgcttttttgagtgggaatagctcattaaattttcaatgcgggaatctccaaaataaataatgtcagaaaattcttcatataaagcaataatttgtgaatgcgcattgaatacttttgttacggccgtgatcgttaagtcatgttcttttaatttcgctacaataaatgaaatgttctctcttaactttgtccgatcaacaacgattctcggatttttcatagcattcgtccttccatgttattatgaagcgctttcaacaatatgatactttttcttctctacgggaaattcacaaacttgcatagttactattcgaaaattgattattttgaatctttttttgaaatatttaaaaagaaataaaaattggcatactaaacattcgtatttggcatttcttttcttgtactaatctgttactttatttgtatgcgtttccaataatttagagaaaggttttgttgcaatgaaagtttatactcgtagcggtgataaaggaaaaaccagtgcaatcgggcggcctcgtcttatgaaagactctccccgtattgaagcctatggagaagtcgacgaactaaactcactcattggcttaatcattagccaagatgaaatcaagcaagaagccttcagtaagctggcaacggaactgactgaaattcaacacttattgtttgatgtcggaacagatttagcaaatatagatggggagcttcccctgcgcatcacagaaaagccaacaaaatggctggagctgcaaattgattggtacactgataagactccagcaatcgaaaaatttattttgcctggtggaaacgccttggcttcatggttgcattatgctcgcgcggtttgtcgtaaagttgaacgccgcattgtcaccctgatggaacaagaagaaatcaacactcacgcttatgtttttgttaatcgtctatcggactatttgtttgtgacagctcgttatgtcaacaccttgaaaaataaagaggaagtattttatcgcaatagtgatcgtgtttttaaaaactaaatagatttcaatcagctattaggaaaaaggtgaaattcctttacagcccctttctactgtaaatgctttaggcaaagtcagacactaatcctgattgataagaacaagcaatatcagggtcgtttgtttcaatcattttagacacccttatattttggggtgtctttatttttttacaaaaggagatagataattatgaagaaaaaaatttgtttttttgtattagcagcagtccttgtgctatttagcggctgcacaacgaaagaagctgattcgacagctagttcaacgccgaaagaaacgatctccagcagtcaagaaacagagattaaggcgtccattaccttattggatggagaaaaggaattatcgaaaaaagacgtaactttcaataagggagaaaaactatttgatgtacttaaggataattatgcgattgaggataaggatggaatgattacttccattgatgggcaagctcaagacgataaaaacaataaatattgggtatttacaataaacgatgagcaagtaaattctggagcaaaggatgttgttctgcaggaaggtgatcgtgtggtgttcaagcttgaacaattctaatagtaaaacagccatcttcttttcacttggagtaagagagttaagcctgctgtcaatgatgatcgctttatgtgtggttagccggaccttcttccaatttatcgtaaatgtccagccagtaactgctattcttttaatcatcaccatttattggggaagctatcaagggcttttagtcagtattttttccattttgatcacaaatttctacatgggaatgggcgtctggacaattgcgcaaattattacctacagtttgattatttttctaaccggtgtattaaaaatgagccctacctttaaaaatagtctgttattgcaggccatttatgccggtatttcaggaattctctttggcttttttatttccgcaatacaggcgccgtttttcggcatttcggccttcctcccctattacttggcggggcttccgactgaccttatgcatggatttgggaatattgtcttttatcttttgctggcgcctattttaaggagactgttgacgcaacacttaagaaagtggcagaaggatagtagtaaatagaatatctgtttgagctatcgacgaagcataacttttaaaatcaattgatctaattatttttcaataaagaatggaggtaatgaaatggagacaaacagctcgttggattttttcaacaccctgcaagcattttctgctgcaaccaatttttccttagtcgttgttaacagacaaggacaggtcatttctgatttttctagtttctcaactttttgccaaaaagtgcgttcaaagcccgcattcaaatcacgctgtcaacaatgtcatgctattggcgaactagaagcatatcaagataagaaggtttgtatgtatcgttgtcatgctgggcttgtcaatgtttcgttacctattattctaaataatcacttgatgggagctatttcttttggacagatagacctaaaggaggacgaggaaaatcaaattcctcaactacagccgacgagtactcgttggcaattttatcccgacttacgacaggcaagaaaacaaaaaacagtgactaaaactcagcttgaagctgctacatcgttactcgaaacaatcatcgattatcaatttaaagcgatcgatccgcgtgatcaaatgaaatttacgcttcccacactagaaatagaaaaacaagctgtgaatgatccaaaaaaagcagaaatttctaaagcgatcacttacataaacaaaaatttcacctctgacttaacgattaaggatgtcgcggatcatgtctatttaagtccgttccattttagtcgcgtattcaaaaaggaaatccaggttcccttcaatacctatttaaaccaacgaagagtgaaacaagcaaaaattcttttaactcattcagacctaagcgtaaacgccatctcaaaggaaattggcttttcacaaacgagctatttttgcaaaatcttccgttccttcgtcggcacaacacctgctaggtatcgaaaaaaaataatcagttagaacgagtgtaaatatttaaatctaaaactcaaatttcaacaaaaactaaaggaacaggaactatcagcttgatagaagcctgttccttcatttttaaaaaaaaatcagcggttggtaattgataaagcaaggttgtcgtaaaaatagcccaatcaccataaatgattgggctctcagaaaataaattagattagtttatctattaatatttctaaattctcatgttttatttaactttttattcctttaaatgccgctgtttgttcccgaatccccttttctgctgcaaaacgttcaatacttgaggcaccaaagaatccatcgattccttttgttttctcaataacatattttgcatcttcaggttcagcgattggtccgccgtgacaaatgaccattatttcaggattaacttctctgcctgcttcaataatcgcttcaattttttctacacaatcatccaaagttaaggctgttttggcaccgatcgttccttttgttgttaatcccatgtgagcaactaagatatcggctcctgcttctgccatttttctggcttgctctggatcaaatacataaggtgttgttagcatatctaactcgtgagctttcttgatcatctctacttctaaatcataacccatgcctgtttcctctagattttgtctaaagacaccatcaattaagcccacagttggaaaattttgtacgccattgaagccctgatcttttagttgtttaagataaatttccattacacggaatggatctgttccgcagacaccggctaggacaggtgtttctttcactacaggtaaaacttcttgtcccatttccacgacaatttggttcgcatcgccgtaagaaagaagtccggctaatgaacctcttccagccattcgatagcgtccagaattgtaaatgatcaacatatcagctccgccggcttcactgcttttagctgtgattcctgtgcctgcgcctactcctactaaaatatctccttgttttacttttcttttaaaatctgcaacgatctcttttcttgtttgcttattcatgattcatttccccttttcattaagttgattaattgctgcgctgaaaattccgcgaacgccttatcattgattgcttgttccttttcaattaatttgacactttcattagttaaatgcttcttaattgaatcaatcaacgctttatctgcttcaggacaatgaaacggtccatcctttacatcaatggctgaaaatccgccattcggaataactagaatggtctctgacttagctaaatttagcttgcttgcgataatcttacctaatttttcattttcttcgacagtcgttctcatcaatgttacagtcggattgtgtttgtaaaaatttctatttttgaattgatcaggaaccgtgtcaaagggcccaaaattgaccatatccatcgctccaagtgaaacaacttgtggtatttttgccaatgaagccgcctctagtctatgttctccagcatttaggattcctccgaccaactcatctgcccattctgtcgttgtcaaatcaagcacacctgtaaaatatccatccgaaactagtgattccatcgttcgaccaccaattccagttgcatgaaatactagaacttcatagccgtttttttcaagatactctcgcgcaaaattaacagccggtgtggtaacgccaaacatagtagccgcaaccaatggatgctcgtcctcttcagtttcaaatcgataattcaacaacccagccattgcagaaacggcatttccaaaaattcgcttcgatatcttatttagtcccgaaacatcgacaattgaaggcatcatcatgatgtcactggttccaacataaacactagtatctcctgaagccactgttgaaacgatcaacttgggaatcccaatcggcaattgtctcatcccaggagcaactaatgaggtcccgcctgtccctccaaaagaaagaacaccatcaaataatccttgtgcaaataattttggaagtaaactctttaaccctctcgataaaacctccgttgcataagctcgatcattacgtttacggattgacgcaatgtcttcatcggcttccgcagcaatctcagctacatcaacatctggaacaaaagatgactcgaatacaccagtgtgaatagtaaacactttcaaatcaagtttttctaaaagctctttgatgtactgatactctgtaccttttgaatcaaaagttcctactaaagcaacagttttcaattgtttctacctccctattctttcaatagttaactgcttacaacttgattataggtagtaaagcctgcattgaaaacgttttatcattcgcagaaatagtttatatattagattttctgtattgttttggtgactgcttcatatattttttaaaaatcttattaaactgtgcatagtccgaatatcccacactattcgctatttcaattaatcttagattcgttgaattcattaactcaatggctttatttagtcgaaatttaattagatactcggtaaaactaatacctacttttcttttaaatagatcacttaaatagctaggcgacaggtttgtaaaatcagctagatcactcatatagatagttgttgaataattctcactgatatatttttttacgaagtcaacataatcataatacttttcaattccctccaaaatttgaatggtcagattatcatgttgcgtgtgagtagcatctttaaaagacttaatctgagaggataaaatttgttcggaattaattctttcaaaggttgatcccccgatatatccttttatctctggaaatttattgtatacgtaacgaacttctatcaaatcattaatggggccaccgtaaaccataataatgctagttgatttaagctctttcaatttcagacaaatatcttgaatagtgctaagcatattttcaaaagatttcatttttttcgcacctaaattaccgccttcagttaaaccaagatggatacaaattatttccggactcacttgatccatttgttcagcttcacgaatattagtgacaaatcccatggtaaatagaccagcttttttggctttaccaataaacgctacctcttgagagaaagttatctgctcctcttctagcgcttctctaaactttccatcaatcaaactgattgttggatagttaacgactcctgcaaaattacattctttaatctgatgggttagctcatctgagtccagtaatggatctgttgcatttacaccaaataagaccggagaattccctaagattggcaataattcttttgtggaaaattccattactaaatcattactatttgcaaatggcaaatacccgcctaatgaacttcgacccatttgcctaaattttccagaattcaaggctaatattaaatctgctccaccttcctttgcgttaatagcactcatcccggtagccgttgcaacacctaagaggaactttccatcataaatttgtcgatttagcttattcaaaacagcttctcttttcatcgccagtcacactttcactcattattttctctgtaacacaagtatacgttaacaatcgaaaaaggttaaattttctcactatttctcaacaaaaataggagctgacccaaaagtcttatagactttcggatcagctcacattcacgaataaacagcgactaataagtagcgtcttatgagtcgacctcttcctattttaggtgaataaacgagcatcaaacgttaaccaattctctccccgtcttctcgtcagtaatcaacacattgatcaattgcccgttcaaagctgctttgatcccactgagcttcttatgaccgcctgaaacgccaattcgggaggggattttttttagcttgtttagctcaatcgagacgactcgatcgttccagctgcatttcgctgcttttccagcatgatcaatgaaattgtagcaaatatcgccggcgattttttcctgtgagtattctgggtcattgtcgatttgttcgggtaaataggcattggtcaaggtagaaaattcaggcgtcccaccgattcctactagcgcgacatccgctgcttcagctgcatccaagacttttttgataaagaattgcttcattaagacctgtttggcttcgatatcatctaaggtgattggcgcgtgcaattcaactgaacgcccgccagaattagtagccagcagttcacagacacggtttgattggatcgtaaggtgttctgttcccagacctccgactaatggaataaacttcacatttggcaattgatgctgtttagaaaaattttctgctgcctcatgaacggtggtacctgatgaaacagccacgacatcatgagattttagaatcctggataagtatttcgcggcagccagtcctaaaactttgccttgaaagtgctgatcggtggattccacacagacaacttcttctagtccgtacatttcttttagctgctcttccagctctctatagggtcccgcaaactgatcattgatcgtaaattcaatgattccttcgtttctggctttagccaaaaactttgaaaccaatgatcggctgatgttcattttttgggcaatttcttcttgtgttttgttttgttcgtaatacaatgaggctatttctaccaatagccttttgtcgtcagctagactcatttgcttcccctttcattccagtaaaatggtgccagataatctcaccggcttacatctgattttttctagccagtaaatattcggctaatccatcggtaagtgtgatacagttaatgatttttgattcaaccgcggtgaacaaaacatcttttttctcatcctcaaaacaaatggcgcaaaccttttcaattttgcgaatatcatgtaaattaatgccaatgacattctcattgatgcgacagcgcacttcattcccgtcacgatcaaaaaaacgcgagttgacatcgccaatgaccttcgcctcagctaaatcagcaatatccttttgatcaatgtagccgatttcggtcatcgtattgcttttagaaaatggcgaggcaatcccgactaaagcaaaatctacctttttcccgtcttcaaggacatccttgaccgtcacattttcaacgaggtttttcttaatgtccctgctatctaccaaagcaggaacgtataggtatttacattttgcccgcatttttctggataggtcatgggcgatctgattcgagtgaacctccactttatctgaacccatcccgccaatcagcggaataatcgtggactcaggctgattcacataaggatattcatcaactaatctgcgcaggaccttcccccaagaaacaccgattctacgagccttggcaatgtccttgcgaaacgccgcgatggctgtttgaacaatcaatttttcaatttcttgtttttccaagtagctcgtatccaataccgccacccgtttgagcccaaaagccttctgtaatttgagctccaactgaactgaataggcacttgagctgttaatgttaatctcgacaattcccttacttctggcgtcaactaagtattttgaaaccaattgccgcgaaattcctaattgtttagcgatatctgattgcttcatctcttctttgtaatacatcgttgccactctaaccaagtcacgatcagccagaatatccatatgataacctcctgtgtaaaaaaacctcccaatcaaatgagggaggttttttgttaaataaacgctatttcatccccaacttcaatcgttggaaattcccccggactaacaataatcgccccaggcagaatttccccaacttcattgcggaaataaatcgaaacatgacccaattcatcaaaattcggattcgcctgagatccaacttcttctatagtatacactttttctccgactttcaatttgccaccgacttgaattgaattttctggctgttcttgtacctcatggatcaccgagatgtcacgtaattcaggcgtcgcctttggtccgaaaagaataatcaagcgttcctcttcaaacgccggcaccattgagccgatttctacaatttttgtttttaccatgtcagattcctccaattttctcgattaatacattccgaagctggcaaaataagccagaatcactgccgtaaagcctgtcagcattctactatatagaatcgctggaacaccgacttgaacggtctcaggttttgcttcacctaaggacaagcctacaggaataaagtcacaaccaacatgggcgttgatagcaaaaagagccggcagcgcatattgaacagggatcgagctattcgcgatttgtgtcccaattaataccccgattacttgagaaatcacggcacctggtcctaaaatcggtgacaaaattggaatactacagattaaggctaaaacaatcatccccggaagtgaacctgcgagaggcgacagcactttggcaatcaaatcaccaatcccggtataattgataattccgatcatcatactaataaaggccataaatggaatgatatttttcaagagcatatccaccgcgtcacgaccggattgatagaatactcccataaccccgccaatgccccgcgagaatctcactaaaaagccatccttcttcgcattctccttggcgtgctcttctttggccttggcatatttctcttcaaatttttcttctgactccgcaggcttttcttctgctacagtcgcttcagcagccgcttgaggtgcagcctgctcgtcagtaagcttaatgctttcaggctttacccctgatacaaaaatatcctcggtaatatgcttggctaaaggtcctgacggtgatgatggtaaaatatcgacagtcggaatgcgcttcattggataaacaccgattcttgctgtcccgccgcagtcaataaccgcacaaagcatttcatcttccggcacttgatttttgaagccgtcccaagcctcagcaccagtaagatccgcgattctctgagccaccggatgaatcccgccgcctgttactgacacaaccttattctttttatctgatggtgtaagggtgaagcccacaccccagccattatttcctggttctacaaaaactgatttatacatttgtttccctcccatttagagtacgcttcgtttttacgcattcgcacgttttgactcttttgcgatcaagaacttcgtcagccgttcagtgacaattcctctaaataaaatcactactacccctaccaagaaatagcgtacagctaaacttgactgactgtagcctgctttcatgaccccgttggcaatccctaggtaaacaaagagctcaccggcattggcataagggaaaagtcccgtaactggatgtaaaaacgaaacaaccgaatcataaaacgcgggtttttcttcttcattaacgaactttccaaatgtataggccatcggatttgttaacatcattacggataaaatcggcataatcgagtagcgaagaagcatatattttgaacaatagcggattgcacggtctactcgatcctgaccaataaaggcgatgactgaataagtgaatgtcaacaatacgataagtaaaggaacaatccctgtcatgaatcccataaattgttccccaccagcttcaaataagccaataaaatttttaccaaaccattcaatatacttcattaatgttcctcctaattattaattaccagtaaccgtttccatctttctggaataaacattggcaagagtagcctctactggagataagcgagcctttttagccttttcctcagagaaccctttcaatgaaacgcctcggtaactcgtatcttccttaaagcgagcaaatacggtaaagcctctgcatacatgacaactgacaatccttccctctgaatcaacgactaccgcaacaatggtctttaatagcttgccctttgacacatccgtgtaaaactcataggaagagttctctttgtactcatctgtgatactagcaataaatttctgatagtatttcacttgaataatgctcgtaaagctttgcgcgatcattaataggaaaagaattatcaatagaatctgcatactattaccctcatttcttaagaaccagatagagcagcggctctatctgcgtcctaaatcgttttcacttttaagcgaatgtctcatcctgcagcttgcgtaatttgtaaacggtggttgattcgtctaactcaacatcgtccatcgttaagaacgcgccatctttgatatctttcttagcaaccgcaccagcaatcaaaccgattggaatgtttgcatttttcttcatgtcttcatgggtttctaagacaccgcgaacacagaagccgccgatcccgtcaattttttcacctgctttgatgtccttcttcgccacacagactgtttcagaaaccggtgcgcccattggaacgatcgctgtatcttgttccaaaacagcacgagcaatagtgatcggtgtttctaacgaacataagtggaatgggcgatataagatatgatgatcacgatcgcctttcttcatcaagtagttcatttcatgggcaacgccttcattttgtccttttacgatacaaaagatccctggcgcaatgccgtcaacgtattcaacaacgccaaacttgcttaaaattccgccgttttcttttaaatctagatttttaacggtgccgtctaaatctgctgaaataccatgcatcccaacaacatcaggaacaaagcccatcgcatttgataaaaggttcatctcacccattgtcttcgtgccatcttggaatgacgctaggattttagggctcatcacctgtgctttggctttttcagcagccgtatcaggattagcatgaaccatcagcttattatttttccctttaccagcaactaatacttccatccccatgcttttagcaaattcatacatttgcatcgttgcagcaggttcgtctccgtctgaaccggtataaatcaagtctgtcgcatcgtacattttcttcatcaatggtccaattgtgatgtcaatttcaacattcagtaaaactaagtgctttttagccatcaaggattctaatgaaatttgcgctccagcttctggtacgcctgtcgcatcgacaatgatttcaactttgtcagaatgaataatgtctttaaaattctcgctaatcagaatgtcgacttttttatcagcgcttgcattgtaagcctccgctgcacgattcgccgcgtctaaattaatgtcgctaatacctgcgacgatcatccctggaatagtcgaaatttgcgaaatcattccgaaccccatttgtcctgcaccaattactccaactttgattggagcaccatttttttctcgttctaataacttaccatataacgtcattttgaaccctccatctcttttgtcatatgccaatgtatttggcaaatgtttaacagttcccagtataacatcgaaaaagtgtttgtcaacgctttcctagaactttttttcaattttatggcatatgcactcatacggaacatatgtcacaacttatattttttgattatcagaaaatattaaataacaaatgatattagttttatcgattgttccaaaattgaaattgattttttcggcttaatttggagcaccataaaaatgaaaaatcagcgattcattctgattattttcgatcaaaatgacccgctggtttcaattgatagaacttgctgcacaatgaacaaccggaagaaaaatctccaaaaaaagtgaacaactgttttagtcgtccactcttgtgatttatattgaaattcaagtaatttgaatcgttttttgaagcttatttttagaaatctccccaaaaatcatcagcggttgtttctgcttgttttggttggcttttacttgattggtaatagctgtgttcgtagttgcgcgtgctgttttttgcatttggaatcaggattgccaacaggatatacaaaagaattggtgcgccgatcaagaaaacactagcaaaaacatagatgacacgtgcgagtgtcggatcaactccgaaatactccgcgattcctgccaatgtacctgttaatactcgattgttttgtgatttagtcattttcttattcattttcttttttctccttttagttaccctagtttttaaaacattcttccgatttttgtttaggtggaagttgttttccttatgactatattatgccgaatctcctttcattcagcatagggcaaaaggccgattttcgactaaacattttggcccaaatcgttgacagtctcaaggcagagagactcataaatcaatcaagtagatcactataaagaatgatccgtcccattctatttacaaaatcctgattgtctaattcgcaactttctaaacaaaacacgacgaatagcccgcagcttttgcgggcttaaaatttgcgctcacctttttaaatcgtacacacttccgcctcatcccaacgttggattttttgatgaggcggaagtgtgctacttattctcgcttgcgcatgcgattgagtaatcgtttccgtttcttcttaggttttgctggcggcgattctttatttgcggaggctattggttcttctgcttcctcctcatatttcgccgtaataatcagcttcgctggcgttgcttgctcatctactgcaagatcctccacggagacgcctgctggcagactggatgtaatcatcatcaatgcctgactttcactaatatcctgcggttccactcccattggtagctggatggttttaattaaccagcctggttttggctgctcttcggtgattgtgaaatcctctggaaagcggatttgtccggtattttttacagactgcggctgcggtttttcttttgcaatagtcgcttctacaactggctgtgcgccagctgtctccagcatgacactcattggatcgtttgctggtttctcaatttcttctttatcatcaatgatcgtgcggacttctcgcacgattactttggcgtggaggacctccttgaatagcgcgaccccatctttttcaaacaggccgatcttggttaatttggttaatgctgttttgacttgatccgcggttttggtgggatcaaaatgtttaaatttcaaatgatgggacttgccaatttcatcggcaaattccgcatctaacgtaatcgttttcattttttagttttcttcctttcgttttttattttttcttcacttggactggaaatcaccttcatgattccgcaaatcctgttaatggttcttcagtgatttgattcaataatcgttcaggttcttcagcgacataggtttgcgctgggaataatttcgcggataataattgccattctttctttccaaaataatcggtaaaataaatataatagcgacgcatcgcggcagtcgagcgggtttttaagaaaatatgattcgctaatccgcgtaacacactcttgaattctgattcgcagagttctgctcggacttgcagcgcgatcaacagttcaatggtggctgtgccatcttttgtctcatggtaaaacttgcgaatgcgtttttcgactgttttccgtgacagcgtaaaaagtttttgtctggtgatgccgtattcttgcacctgatttcctccttgttcgttttaatgtatttatttttttgcaaaaaattaagttgattctcacgccgtatatcattctgctaaacaggtttattgctttctttgactatggctttctattttttctgagctatagatgctgtgaaaagcagaagtgacatcctttcttgaaatcattctttattgagatatctacaccaacaacatacgcctattttcgcgagatttacacaccaaaaatttgattgcaactaaaatataaaaatcctaatctaaggaatacgacaaccacgtatcaaaaacctacataaaataacttaattaagaaataaatacccatatttttatctaaaaataagaaaaaagcccacgaaatgatgggcttttgacgaaatatcttattttaaatcattgataaatgcgttgataccttcagttttctcaatttacttgatgaaatctaagacgtttttgtaatcattcatcgcgtgcagcatctccgaacgcttttcagtcgttgttcgatatccccccaactcaccaaagccatccatgcctgacaataaggtatttaggactaggttactggaaatgttcttccttgcgccatagataacagcgatgtggggattcacttgcttaaacgtctctaaaaattccttttgctccgtattcaaacgagcactagcagtcgaatctgccagatcatcgctaaaattccatttgatgatatcgatatcctttaagacattttcaggaatgtcaaagggcttctcggttcttactaagacggaataattcagttctttgactatctctaaaatattttttatgttgaagatcgtttcaagatcatcgaaaataatgacctcagcgccttcttctcttagctttttcaaattttcaggtttagcgtctgtaaaatcaatcgcgagtttgattcgatgaatcacatttttaactttggagacatcctcgctgcacaccgtaaagatggcgtccattcctagctgtgagaccttttgatcaaccagcacagcattcttgacagcctcttcatccttccaaagcacctgagaattaacacaatagaacggggtttgcagtcttctttccttcatcactcgatcatcctttctttgataaaaaacgggtgaaaaaaatcacaaacatctttaaaaaaaagagctcactcggccgaatttacatttttttcaagacgcaccatcaatctaatttcgcattattccataattaaaaaagaatgtcaataatattgtgaatatctgaacatgaaaattttcgctcgtattcttcttacattctttttactcaacgaagattctggtttatatcatacatcatcacccttccacttacaccaagtgggctgtaaattaacacgataaaatcaacactaatcactaaaacaaaaatttttttgacgatcattcaatcagacaccatcttctaaatgttgctatttacacatttccgatttctaagccgtcaatttctcacccacgattttccagctaacaaaagaaaaataaaatttatcgtttacaaattcacaagttaaaggtatattatactagaattataaaagtaaattttaccacaaaggagcttttcgatgacaaccaattttgattcaaaagagtatttggaaaaagtagacgcatggtggcgggcagccaattatatttcggtagctcaaatgtatttaaaggacaacccgttattacgccgtccgattcaaaaagaagatgtaaaaacgcatccaatcggacattggggaacgatttctggtcaaaactttttatacgcccatttaaatcggaccatcaacaaatatgatctaaatatgttttatatcgaaggtccgggtcacggtggtcaggtcatggtggccaactcttacctagatggaagctataccgagatttatcctgagattaccgaagacgaaaacggcttaaaacagctgtgcaagatgttttctttccctggcggcatcgcctctcatgcggcgccagaaacacccggctcgatccatgaaggcggcgaactaggctatgccctgtctcatgctactggagcgattttagataatcctgatgtaattgccgcgacagttgtgggcgatggcgaagcagaaaccggtccattagccggcggttggttctcaaatgtctttatcaatcctgtaaatgatggcgctgtattaccgattctttatctaaatggcggaaaaatctctaatccgaccatcctttcccgtaaaagcaacgaggatttagcgaattattttgaaggcttgggctggaacccttattttgttgaaggaaccgatccgcaggaagttcacgaaatgatggcgaaaaccttagatgccgtaattgaagatattaaagaaattcaagccgaggcacgtaaaggcaaagccgaagaggcgacgatgccagcttggccagtcattttgttccgcacaccaaaaggctggactggccctgaaacttggaacggcgagcaaatcgctggtaccttccgtgcccaccaagtaccaattccagtggattctgagcacatggagcatatcgacaaattagtgaattggttgaaatcctatcgtccagaggaacttttcgatgaaaaaggaaaaatcaagcaagaattacgagtggtttctccaacaggcgataaacgcatggcaaaaaatccgatcactaatggcggaattgaaccaaaaccaatgaaaatgcctgattggaagcagcatgccattgatacttcgacaccaggtgcggtaatggcgcaggatatgatcgtctttggacaacaagcccgtgacatgatcaccgaaaatccgacaaacttccgtatttttggtcctgatgaaacaaaatcaaatcgcttaaataaagtctttgaagtcactgaccgtcaatggttagaaccaaagaacgcaacggatgaatggcaatcttctgttggtcgtgtaatcgatggccaattatctgaacatcaggccgaaggatttttagaaggctacgtattgactggccgtcacggtttctttgctagttacgaatctttccttcgagtggttgattcaatgttgacacagcatttcaagtggatgcgtaaagcaagtgctcattcatggcgcaaaaaatatccggctctgaatgtgatcgccacttcgactgttttccaacaggatcataatggctatacccaccaagatcctggtattttgactcatttagcagagaaaaagcctgaatttatccgcgaatatttgccagccgatgccaatagcttgatggcggtcatggataaagcgatgcaggacgaacaagtcatcaacctaatcgtttcaagtaaacaccctcgcccacaattctactcagccgctgaggcagaagagcttgtagaagaaggcttgaaggtaattgattgggcaagtaccgacaacggcgaagaacctgacgtggtgatcgctgcggctggtaccgaaccaaatctagaagcattagcagcagtttctctattgaataagaacttcccagaactaaaaatccgctttgtcaatgtcgtggatattttgaagctgcgccatccagatgttgatcctagaggcttgtctgatgaagccttcgatgccatctttaccacggataagccaattgtcttcgccttccacggctatgaaggaatggtgcgggatatcttctttgatcgtcataaccataatattcatattcatggctaccgtgaaaatggcgatataactaccccgtttgatatgcgtgtctttagcgaaatggatcgcttccacttggcacaagacgcagcaaacgcagcatatggcttggatgcagcagcattctcagctaaaatggatgaaacccttcaattccaccacgattttattcgtgaaaatggaacggatattccagaagttgcaaattggaaatgggaaactctaaaacaactacagcaccaatcataagaatccttacaaaaagccaaggtgtcacatcttggctttttgtttaaaatgttaacgatgaaaaagaggtgaaagacgtggagcaaactgttgtaatcatcaaaccagatggcgttaagagaaaactaatcggaagaataattcaacgtcttgaggatcgtggcttgatcatcaggaaaatgcagcaaagaacccttgatgtcccattagttaaggcccattatgctcatctaagggataagcccttctttgatgacctgttggcctatatgacctcaggcccagtcgttgtcatgattgtcgagcaaaaagaagtcattcggatcgttcgaacgatgattggcacaaccaatgccttagaggctgcaccaggaacgattcgcggagatttcgcattaaatgccagtgaaaatattattcacgcctccgattctccggaagccgcgacgatcgagattcagcgcttttttcctcagtaaatagttaaaaaaagaagtacaatcctgagtgaaaccactccgattgtacttcttttcttattcacccataatcattaaattgcaggtacgtgtgcgttcgcgattttgatcccaatcaacaaaatacagatacccaactgaaccgatcaacggttcgccatccttgatgatgaccgtttcgctggctccgaagaacgaacctttaatgtgtgcatccgcatttaaaatcgagactggatcaggcagataattagggtccttggcagctaagtctttgagaaattccacatgggctggaccaggatataagtagtctgattccgtatattgtcgtgggattaatttatctaaaatgcgattttgatcaacctgtaaaaattcgtcacccttccaatccttgtcgtgaacgtattcttcaaaaatgaccgaacacgtcgtatgaggagtcgtgatggcgcatagaccatcccgaatgccagaatttttgatcgcttttcttagctgaagagtaatatctaaatacgtcaccttccctgcttgagtatccagagataattgttcatgttttacagccattttgtctaacctctttccttatgtgcttttaccaatgcctctaccatagcagtcagcatctctgccggcgaatccgcgtttgtgattccgctggtacaaccagtcccatcggcaccgagttccattgtgcgataaacatcgtctgcggtgctgattccagcggcctgcatgactaaaatgtccgcatcaatcgccttaattgcctgattggtttgttcgatatagctacgatcacttgtttgtccggtaccgatcagttcggttggctcacacaaaatgacgtccgcccccatcattgccaccgcttgggcttccggaatagaatcagcacaaacaatcgtttcaatccctagctccttggcccgtgtgatggcctgagctaacgcagcgacagtcattggccgctcggcgtgatttaggaaaacagcccgtgcccccgcatgataaatcgattcaggcaaaacatgtccgatccctctgcctggataaatcccatccatatgctgtgcggtgacgatgatcttttctgtcgtctgcttcactgcggcaatatccgcaaaaggaacggtgaccaagatcgaacattctggatatttcgcagccagttcatctgcacgtttcgccaatttcagtaattcttcgccgtataaataagatttcggattaaatacgaaaaatggcgacttgattttagtagacattcgttgctccccctttttaattcacgcttttcgtcgcaaaaaccttatagcaagcttctagtgtttcagccatcgcttcattcgaaagctgtttcatttctaagtagtcttttggttgcccattcatatttttctgataagccgcatttaggaaatccgtgaaaatattgattttggcaatgccgctggtggcacaacgatttaggttcgcgctgccagatgaggagccgccatgtaaaactaatggaacatctgtgatctgtttaatttctgctaaacgctcgaaattcaataccggtgttcccttgtaggctccgtgagcggttccaattgagatcgccagcgagtcgacattggtattctcgataaaagtctgaacatccttgacctctgtgtaaatagaatcagtcgtttcatgattttcataattggtgccggcaccgacatgccccaattccgcctctacggtaacgtttcttggatgagcatagtccactacttttttggtgatttcaatattattttctagactctccttagaggcatcaatcatgacagaggtaaagcctaaatcaatcgcctgtttaataaaatcaaaatcttcgccatggtccaaatgcaagacgatcggcacagaagccttattcgccaaatatttcccgattaatgccgcctcttctaacgagatcaagtctttgtgagcttgggcaaatggcagcatcaagggtttatttaatttttccgccaccgtaacaaatgtccgggccgaatctagatcgataaaattcgtagcaggtacagcgtagccttctttactggcctttagcagcatttccttggaattgactaacaattgaatcctctcctttttttacatttgtaaaactctatttacttttgtaaaaattgtagtatcattaaggtgaaaagtcaacggaatccgcgaatatcatttggtataaaattattttcgcaggaacatatgttacaaggagggatacaaatgcttgatcgtgaaaatttgatgctaaaaacggcgcttctctattacgaagaggaagccacccaaagtgaaattgccaaaaagctgaatatttcgcggccaacggtggcttcactgcttcacgaagccaaagaaaaaggcatcgtcaagatcaccattcagcacaatgagctgcacttactgaagctgcaggaaacgctgatagaaaaatatcagctaaacaatgtaaaaatcgcggcaaaatcccaaaaggacaagaaagccgccgccggaaaactctgcgccgacctgattgagcccatgctaaaaagtatccataaattaggaatcggctggggctccacactttatgaatacgttgaacacgcgaatttattaaatttaaaccatttgaaaatcacgccactaatcggaggtatcggtctttcagaggtccgttttcattccaatcacttagcctttgttctatctgaaaaatacaacagcgaggtctcctacttctacgcacccgcgattgccgataccttagaggtgaaggaaaccctgctcaagtcagagttaatcaaagaaatcatcgaagaaggaaaaaaagtcgaccttgcgatcctaggtgtcagcgatcctattcgctcctccacctataaaaaattgaaatatatttccgaagaagaagcagcgctgctgaaaagcgagcacgccatcggcgatatcggcagtacgatttttactgtagacggcaccccattaaaaaaaggcttctcccaacgtctgctgggaattgaactacaggacatcaagaaaattcctcaagtagtcatcgtagctaccggaaaagaaaaagccgagagcgtccaaaccctgcttaagatgaacttcattacagatctggtgatagacgaagaaatcgctgaactgctttagttcagcgatttttaggtgtattcccacccacaaacctcttccgaaactgcttcggactgcagccgtatttctttttaaaccttgcgatgaaatagctcaaattattaaacccaaccgcaaaacagatttcagagattgtctcttcggtttccaaaagccgttctttcgccttcaacaatcgataatcaatcgtgtagttcataggcgattgattggtgtaggccttaaacaaactcgtacacttatttttattgataggaatcacttgagcaatcaccgccactgtaatatcttgttgaaaattttgatggacaaaattcagcagctgataaatatcctgatcctccttcttttctgaagaggtaggcgaattgccgatctcatttagacagctgaggattagttcatagatttttagaaagttataggcttgaggagtctctgcgatctcttgtaaaattgcctgctgatgaggcgcaagtgttaatagccggcagataaaattctgattatcttgcaaaggtttgatggtcgattgatacaattgttcattcagaaaatggggcgaaaaatcaatacagatgtactctgccgtttcagttaagggaatcacgtgatgcagccttcgtgaattaataatgatcccactcttttcatggatctgatacgtctcttttccaacagaaagctccaaggttccggaaagaacgaaggtcagttgaaattcttcatgccagtgccacatcagctcatcatttctagtccgttctaaaatgcgatgatagatcgccagcgggaaatcaccgattcggtgttcggtttgctcctgctcagcttcattgacttcaaaatacatcgccttgctcctttacacaataatgataaaaatagtctttattttgatagaaagtcaaaaatacaacgttctataatacagtatcacaacactattggtaaattaaaggagaacattatgaaattagcagaaaagaacacaggcatcctatttgcgggactagcagccacactatgggcaatatcagggatttccggacaaattctatttaatgactaccagttttccgctgaatggttggtttctactcgaatgtttattgccggacttcttttactatctgctgctaaacttacgggcgcgccttcaatcttcgccctatttcgagaaaaaaaagaccttatcgcgattctgactttttctattctaggaatgtatgccgttcaatatacttatttcaagacgatcgagctaagcagtgcctccttcgctacgattattcaatatacaggcccattttttatcatcatttatgaagctatgaaaaacaaacgattgcctaatcgaaacaccctgctgctgatgcttctaacacttattggtgtgttcatgatcgtcgctaacggaaatattgctcaattgacagtcactccggcctccttgctttggggtgtcggctcagcgatttctctagcgttttattccgttcagccccgtaatctgctaaaaaaatacggcagtctcttagtcgtaggctggggcatgctgttgggaagtgtgcccgcaaatctgatccagccatttttccgctataccggggaactttcccttcattcgctgctacatattttgatcgtagtcattttaggaaccgctgtttcttattttatttacctgtccagcttgaaatacatctcgtcatccctagccagcattttgactgccttcgagccaatctttgcgaccgttttgtccgtcccgatttttcatacgtcattgacagccatcgcaacgatcggttttgtgattgttattgggacgatcttgctattgcagaaggtgttgtaaaatgcgggatttaataaaaaatagtaatgagccgttgttcgtcacgcaacggctcatcactatgaataaacgtttctataatggttgtttgcttccgatagtgaaaacaccaaggaccctttcataaccaaaaaatatctgattatcctataaatcaattcccaaacccaatcataggagacaacacaaatgtcgattactaaaaatatccttcaaagatactttgagcgatagattcattttttagcatggtttattttgtcgtaaaacgatccacccaaggaatcaacggactataaagggtcactaatctacctgtaaagagcgccgcaatgatcgttccttctcgaatcccgacaagtccttgaaaataaagcagcgagatcactagcgctactgccaccatcgttaaatctgtatacatctttaatttgccgaaaggtttcttcgtacgcaaggtcagagcgaccaccagtccttctcctggcatcaaaatcgaccgcgaattgacttcaaaaaatacacccagagacagcaccaccattccaagcaatgtaaatgccaattgctccaagtaatgtcccataagtgccggcaaacccaagttagtaaatacatccacaaagacatcgatcaacccaccaaaggcgagacctggtacgatttgcaggataataggaaggttcacctcacgtaagatgaccatttgcaagaaaatcatcaagaccatgaaaatcattgtcaagtttccaatcgatagtggtgtgatataactcatcacattgggaatactagaaattggcgaagtacctaattgggcaagcttcgctaatgcgatcccgattgacatcaggctaattccgacaaacaaaaccaccaaggattttatttttgatagcataacaagactcctttcacaataaaaacagccgcaatttgctttttatgactactcaaacaaatgtagccatagaaataaacaaaccgccgccgcgtattttcgtgttatgcataaatacgtccttctctatattaagaagcaattcatattttgtcaaaacaaagcacacttagtaacttcgtctttttcgtaatactccgcttcgtcattagaataggtaacaatgtattcttggttttctggaggtctcttcccgttctctgaaggcaaaggattaaccttttctgttcataacaaaacagcccaaccatcaattaagatgattaggctcaactaaagcaacttcacaaatagaaaatagcaacttcacaactagaaaatctttctatagaaaacaacaaatacttttactcctctactcgtctgctcatgattcttttgagtgttttttctctgatttcgatgcttcttgaagcgtgttgattgttttcgtaaatatcaacgatcaatccagagatatacatctggctcattctcccaggtacaggtgaattgaacaactcatcgtaagagctttgcagcacgacattgctcagcttcgcaataggagatagcaaataattggtaatgccgataactgttacgtcgttttctttagcgatgttgatcgcatcaatgagatccgctgttctaccggttaaagaaaaaacgataagcagatcatctgacgtcattaccgttgccgcattgatttgaaaatccgaatctaacagggctgttgattgtacaccatttcttagaagtaatttctccaaatccgttgccgctaagccgctttgacctttgcctaaaatataaatatggcgtttctcttcgattaaacggacgacttcgcgatagtcatttttgtcaattagctcatgggttctgtccagagtttctttgattttgttcaacaggtcggtgttattgaagctgtcatgctccagcttgacattgtttttagcaatcgagatttttaagtcagtaaagccggaaaagcccacttttttacaaagtcgattgatcgtagcatcgccaacattcaagagctgcttcaagtcactgatcgtgttgtgaatgaccttgtctttgtttgaaacgatatagtccgccacttttcgctcagatttggttaattcgtcataatgtttgtttatcatatcaacagcattcattgtgttcgttcctttaacagttatattttcctcacagatttaggctttcattcaaatttatgataccatcttttcctaccttaatcatatcattaaaatcaattgtttccgcccttaattggctatattctaaaaccatcggcagattcataccagtgacgatctgaagtttccccttatacttgggggcggtcagcaagcgtgccaccacattcgccggcgtcccaaaggcaagatcacaaaaaacgaccacaccgtctcctgaatcaacagaagcaattttttgaactaattgttcattaaattccgaaatgtcctgcccagcggataatgataaagcagctaattgctccaatttgcctgaaaacaattctagcgattctctcatgccctcagccaatccgccatgactgactaataaaattcccttcatagacacaactcctttccctatacgattccaaagaatgacagcgcgatcgaaacgataatggttccgaaaataactttagaaatgctgacttttttcttcccaatcaagaagtaaaataaaaacaagaccaaaatggcgaagagtcctgggatcagattgtcaaaattatcttgaatcttcattttcgtctcaccaaacgtcaccgctaatggtgtaaccaatgtgaccatcgaagcagtcaatgcccccatcatcatcatgcccagaatattcgcaccctccagtacgtcagtcatcaagcgagaggacaaaacatccttgatggcctcacgacctttaatataggtaagattcgtcgtcaaaacaagctcgcacatcagaataaaattccctaaaaacagcattagcaaaccaaaaaatgacccgcccgccgccaaggtactcgccgctaaaatacaaagtgtttgcaatgtgcctgcactgaatgaatccccaaaagccgcaaccggacccatcaatcctgttttaatcccaataattgcctcatccgagatgtttccttcattggccttttcttcttccatcgcaagaaccgttcctaagatcaatcctccagctgtacaattcgtgttgtacaaagccaaatgccgctgcaaagcctgcttcaggtcgtcttttgtatcatacagcttttgtaatacaggcattaacgcatacgtaaaggaaatggactgcattctttcatagttcaaggagatctctgttgaaaaataccagcggaacatcgttttgttaatatctgaacgcgtcagtttcttttcattcttttccattttcttaccctcccattagctcagacagctgcttacgattcagcacagtaataaaggcgatcgaaatcgcgatgatcccagttactagagaattcatacctaacacagaaacacagacaaaaccgataataatataagggatcagccgcggttttccaattgaattaatgattagcgcaaacccaaccgctggtaagactccgccggcaacctctagtccatgcatgatccattctggaacgacttctaaaagattcagcatcacatcttgaccaaacaatacaacgataaaaacaggtaaaaacaataataagaaagaagtcgccaccggataccagattgctgctcgagcgattccctttgtgtccaccttttcagcatattcatcggccttatgaaccaaaggaacattgatgattttacgtaaattcaataattgcgcgcccaaaagacctaacggaacagcaaaggcgattgcctgctccacagataagccggtatttaaagcgataggaatcatagtggccgcggccatcccttgatccgtcggcagattgcctcccggagcaataatccccgcaaatacagccgcgatccctccgccaatcatcagccccgatttgacatccccataaatcaagccagaaataatcccgatgaagattggatttccaatgaaaaacagcgcgaaatatcccccgatcattccgcgacttaaccaataaaccagcgccattgcaacagccatcattacactattatccatagtaattcctcctactgattttatttttcaggaaaataggtgtgattttcaccacatatctcactccactaaaatgaaaaattactgaagcagtggaacggacatcctgcctacttgattttattcgcaatactttctaacgatagtttttcattttcaggaattggctgaatatataccttcaagcctgtttgttgaatttcctgtaaacaatcaaactcctctttggataaggcgacacctgatgtcacgaattgacgatcctttccagtctgaaccgcaccaacatttaattccgacagacccactccactatctaatgcctgcttcgcatttttaatgtctctgaagatcagcatgacatcatcatttttcttatccagtgctgcctgcaactctgctaaaccaacgatctccacttcatttccaggagcagccattttgtagatatcgcacatgaacgcatcatttttcaattcatcatcggcgacaatgatccgattcactggataatacttgatccactttgctacaacctgcccgtgaatcaatcggtagtctattctgacaattttctgctttgccatcgttcctctctccttttttctttttttgactaaagtttcactcggtcacctatttccaaactcttatgaatcgcctcggtcactcttgccgcctgcaatccatcatacacatctgccacaaaatcagacccatcgatcaagcaatcaacgaaactattgattgggtctgccccaaaaccaaccactttattattgaaatcattgaagaaaaagacattcggtgtatgtgatttttcattgtctaccatctccactccacgatcctgattgttgatgcgaatgtatttttctgaagtcaaaatcgacgttcgactatcattcgccttcgcaaagcctgatggcagaacccaagaattctccaacatccacgtgcaaccgttctcaaaagtaatcattgattgaacactgtcatacgtatcaacgcccatgctaggcaagagcttctttgatccaactgaataaacttcggtaacttcacagcccatataccaacgcatcagatccacacagtgaacccccagaaagtcaactggatcagaagaattgccccatttgaaccactttgtcggtacatcaatcatatcgtccatgttcatgtacccgcgaatcggataaccattttcagattcattcaactgattgaaggtataaatcgctgctgggtcccagcgtttatggaaatcaaccgcaacacgcacattatttttctcagccgcatccataatggatttacaatccgccaccgttatagctaacggcttttcaatcaatacgttgagcccatgattgatacaagccagtgctggctccacatgaagatgatctggcgtagcaattgaaaccgcatccaatttctcgctgtctaataattcctcgacagtttcatacgtccttacaccatacttctcttctgccatctttcgaatatccgcactgaaatcacaaacagcggtcaactccacaaatggattttgcttatacacatccacatgatgaatcccataaatcccgacaccaataactgcaacattcagcttctccataaaaattatcctccgtttttatcaattatggattaattatccataagccaagtttagcaggtttttattttatgtcaatatagaaatggagaataattggataataaaaaatagcagcatacaccagaacggtatgctgctttttaacgctagatttttattgatcaagttaaagttatatgatcaggtagtctatcgaacaaaccatgttctatcgtttgtcctacctatctaatcacactttcataaccaattctttccatattatctgacgaagcggtgacaaaggatacatctcatgccccatctcatctgtgggttccaaggataacacgctaatcacgacattcttcttagggatcaaaatgcaatattgcccgagaatcccccacataaatactagatcattggcctcatcaatccatatttgataaccatagcctgccttaaccggaggatcgttaggcacaaactcgttgctttcataatgtggaacgaacatatcatcaataaatgcctctgacagtatacatttccccttgtacactcctttatttagtagaagctgaccaaaattcccaacctcatccatacttagctgcagcgcattggccgcgattgtatgccccatcggacagctggtccattcgacattgtgaatttctaaaggttcaaaaagccgatacctcaaatattctcgcagattctgacccgatttcttttcgattaaacagcctaaaatataggcatttgcgttgttgtatagaaaagtcgttcccggctcattaagaaacggcgcgtgcttaaaaaaataacgcacccaatctcgttcatgcttccgctcatatccagctctgcgaaacattcgttcactcacacccgaagtcatcgtcaataaatctctaaccgttatttttaaagcgttttcattcgtgaggtcgtagctctcttccggaaaactatcaacaattcgatcatctaaggtgattagtccttcttttatagcaatcccaacacctgccgccgcaaatgttttcgaaatagaatatgcttcaaatcttggctttcctgtaaatctcgtccattcatcaatcacttgaccctcttttcgaatctgagcagcagtaacatacagcttcttttcctctgtcttctttaaaaatccctctaccaatcctgtcatcggaacagcctcctatttgttatttatcttgacatctgtataaagtgaacatggatagaaaagcattggattatcttagccgataaacttcgaacagtttttatatgagttttcaataaagatagcatgaagaatggcgatgtgtaaatatatattatattttggatttcttaactaatttcacttgtttaaaataaaatatgagttcccctctcgcagaaaacgcgacattcaccgtgacgcatgtcgattggatgattgagcttcacagataagttctgcgaaatctattataaaattataattctctgaattgatttccatttgtattgaacttgcagacactttcatttcttcataggaatactaagtatagcgtccattatcttcctttctccatctcaaccttgtgattttaacaaactcgtttacatttttattcagtaaatgatcgttaacttttttatttgttgaatataaaaagtagtccagtaccactctcgtgatactaaactactacttttatatttattaactcctattaaagagttatctggtcctgaaaaatactccaatcaaaacagaacaatcaattatattagtattattctactgtaccaattttattctgtgcttgattctcccctaaatctaaatttaatttcttatctttcaaatttgtaaaaatgaccataacatcagtttttttgtgttgtttttctagatagtctatattaacttttgctaacaaagtatctttgtcaactttatcatctgtttgaactaaaatgtcaaaaccttcaccatttaattcaaccgtatcaattccaatatgaatcaaaatttccatcccattttttgtaacaagggaaatagcatgtttggttggaaatatagctgttactgtagcctttgtagggctatatatttccccactacttggaaaaacaccaaacccagttcccattgcttcgctagcaaaaacttcatcatggacacttgatagagggacaacatttcctcttacaggattaaatagttcagtagtttttttcttattaaatagccccatgttttaagactccttattttgaaataatctcaatttctttacctatttttttatcagatttatctgaaattaaagtaacatccttcaaactaaaagctttaactgtcgaaactttatgaaatttactactatcacatagtaaataagatattttcgcttgacctaatactgccatctttttagaggcttctacataatccggcgttgttactccaaattttaaatcaatcccgttagcacctaaaaaagctttatcataaatatatttcttaatattttcttcggttaatgggcctgaaagagatgagataattggattaaatgtacctcccaataaagtaatgtcacaagaaaagtcaccaattaacgacaatgcgtcagtattagtcgtgataatgtgtatcttctttttaacaatttcctttaacaatgcaaaacaagtagatccggaatctaagtatatcgtatcgccatcattaatatatctggctgctactttagcaatgtaatccttttcttttgtttgtagattagttttagccgagataggcaattcaatagtgctagtcatcaattttaccgcaccaccagctagaagttgcaccttatttcttttttctaactcttttaaatctcttcttaaagtagaaattgaagtttctggaatatacttttgcaattcttctattcgaagaagttctttttgattgaggatttctacaatcttttcttgtcgttcatatggtatcaattaactgtcctcgtttctagttttactattactataataatagcatagttcaattagtaacgactattctaccaatttctttaagctaattgatcgtctttatttgtaaataaatagcctaatacagctgaaattagtaacgaaattaataaaccaatcatcgcgtggacaaagtttgtactattctttgtcacaaacgcaggaaatgtagtaacactaccaaatacaaatgaattagtaacaactttcataagacctaagtatgcaccaccaaccgcgccacctataatttgggctaaaaacaatttcttatttttaactaacagaccaaagagcgtaggttctataatagctgatagcgctatcgtaataagacctgttaaggcgaagttttttagctttttatttcgtgctttaaaaataactccaatagtggtaccaatgacagcaaaattacaagcaaaagtaaacggcacaatatagtcaaaaccgtgcatcgatatattattaatcataatgggattgactgcccaatgaattccaaagcttacaagaacactccaaccaccacctataagcactccagttagaatactgctgcgctcaattaaccaatttacaatattagctattccctctccaccgtacacgcccaaaggaccaatgacaataacggttaatggaaccattattacaagtgaaattagtggtacaataactagctttaacgtttctggaacatgtttatctaaaaatttataaagataagaaaatgcccatatagataaaataatcggcacaaccgttgaattgtagttcatcaaaactactggaattcctaagaaattcgtagtcgcaccattaccttgattccctaataatgcaatgaaatcaggatgtaacaacgatgctccgattaaagcagacaaataaggacttgcgccaaatctgcgtccagatgtaaaagctaacaacactggtaagaaatagaaaacactcattgaagtggcatatagaatagtatacgtaccactattctcgctaagcacacctatttgaactgctaaaataattaaacctcgtaagatcccagaaccagccagggctggtaacaatggtgcaaaaatggctgaaatagctgaaaaaatattagtaatgatacccccacttttaacattactcgtctctacttgtgcttgaccattattattaactaactcttcaaattcgtcatataacttaggaacttctgtaccaattaaaatctgatattgccctgctttattaacaacattagcgaccccatccagttgcttaatattttcatcatttgcttttttatcatcttttagcgtgagacgtaatcgtgtagcgcaatgagtcatatttgaaatattttctggtccgccaacttcatctaagatactttttgctagattcttataatttaccatttttttcactccccctaaaattatgctaaaaatttaattactaaatcactcacttttacagcactgttttcatcaattactgactgaatatatgacatacccaatttaccaattaaattatctagtttctttatcatattaatattacgtttgcattctgcaacaggatcttcaattacaggaaatgtatcgaaataaatcgcatgatcatattcatgaagttttatataatatagaaattcgattgtcttcactaaactacttgttccaagcattaagccgtcatcattcaatccatagccatcatttaaatgaaccccatacaacttgttccgacttcctaaaatgctagcaccataagctggattttcatgtttcattagcatatggcaatagtctagagtaattcctaaattatcccgattaatttcattcatcattaccatagctaagcctaatgaatcgataaacgcatatgctcgtggttgaaaaggcttgtattcaatactaaatttaacatccggtgcatagtctgccatctcaataaagcaatctcgaatttgtttccaaactttttcatagcttatttggaacgagtaatcaaaaccatcaaatcctaaccaaatcgttactacttcaccaccaactgctcgacaatagtctgcggcgtctttacaaagttgcaaagctttttttgaaatttcttcgttagcgtttccaatttcgccgttgataaattgatttctaaaacgaagagcaactccatttaattctaaattattctcactcaaaatttttttcatttcatctggactgtaatccacaacatgttcaggataatttagatcaacatgagttaatcctaaatttttgaactctgcaaagactttttccagattattgtcaaactttggtaaaaacgagttaattcttgtagctaacttcatttgatatttcctcctctaaccttatgtgaggtaatcataccactttaaatcaaattattccatattttttcaaacatttttatattttttcaaaattagatacgattaagcatctcaattctcttagaatgtctcccgccttcaaacttcgcatctagccattccttgacaatcattttggcaagctcactaccgacaacccgtgagccaaaggcaagaatatttgtgttattgtgttctttagataatcttgcagaataaggttcgctacaaacgactgctcggatacttttaactttattagcagaaatcgaaattcccactccggttccacagataagaatgccacaatcaaaattacccgctgcaacctcttcagccactttcttaccataaattggatagtctgttctttcactcgagtatggtccaaaatcagttacctcatgtccaagctcttctaaatactcaataattactggttttaattcaaatcctacatgatcgctaccaattgctaatttcattatttacgcctccactgtttcatttctaagtttattcagaatttcatcatatctatctttctttccaaataaagcagaagtacctaagacaaaaccagtcacacctattccattaagttgttgaattttttctggagaaatcgctccatccactaggatctcaaaattgaaatcctctgccaatttaacaagtttttcaattttaggattcacaaactccaaatatttttgtcctgcaaaaccaggattaactgtcattaccatcacataatcaattaaaggtaatagttccaagatattttcaactgacgttcctgggttaatcgcaattccagctttctttcccataccacgaataacgtctaatgtccgagacgcctgttggtccgcttcaggatgaatataaataatatccgctcccatagtggcaaacatttttacatgtttacttggatcttgaatcattaaatgaacatccacggtcttttgagtagaagatcgaaccatttcaaagtcctgtagccccataccaaaattaggaacgaaactaccatccataaaatcaatatgaaatatatccgtaccggctcgatctaattcttcaacttcttctttcaatctagaaaaatctgcacacattaatgatggacacaataattttttcatctcttcaacctccttgagtaatcgatttcccaaaaaacaaaaaaataattgagtaatcgattaaccaaaatatatcacctcaacaaaataatgtcaacgtcttatttaatgattccattgtattactaatctgtttatgggaaaatatgagtaaataaaacacgatatggatatcgtttactcaaagaggtgctactttgaaaaaatattctttaaaagacatcgctactctcagcggtgtatcaatcgccaccgtttcccgagtgatcaatgacaacggccgattctccgaggagacacgtcaaaaagtcttgaaagtgatcgaagaaactggatataaaatgaactacaatgctaaaagtcttagaatgaatcgttcttttacgattggaatcttagttcctgatatcagtaactatttctttgccgatgttgtccaaaaaatcgaagaaatcttatttgataaggggtattctacgataatatgtaatactgctcgtagtcaagaaaaagagacagcctacttaaaaatgcttgaaggcaaaggcgtggatggcttaatcgtgatttctggagcagaagcttttgactttgattatgcacctagcgacaagcatatcccttacatttgtattgacagagagccaaaaactagaaaagacactatattcatttcgtctaatcattatcaaggcgcttttaaggcaacagaagagctaattaactctggctgtcaacatcccttaatcgctatgcatagtagaaaatctacgtcaacaagagaacggttcagcggttttaaagatgcattaaaaaagaataatatcgtcttttcctctaagaatcatttgctgaatatagatcctgacaaacaaaattttttaaaacttattgaaacttatctaacagaaaatcctaaaattgacggaattttttgtatcaatgattcgattgctttagaaacgatgctagttttacgtcaattaaataaatcggttcctaaagatatcaaaataattggatttgatgatactcctgcagctaaatatgcgtttcctccactttcttctgttaaacaagatactgataaaattgccaaagttgctgtagataatttattgaatctcatcctacatccaaatgagacagatcaattattaattgttccagtttcgctgatttcgcgccaatcaacaaataaaccatagccaaaaatattgctatggtttatttgttcttgcatcctactaattttctgaaataattatagatacttgccaaccatccactaccacatgccatctttcagtaattttctaacattcccctagaattcctatcatatcaatttagatttgaataaaatcatcacttatggcgcgttttacgaagcccaactaaattatccagtgaaagcttactaaccaaactcagcttttcaccaaaaaaagaagccacaaaggacttcttccttaactcatcgtattaaagttatttctggacataattatttgttcaacgacttcacataagcatcaaccgcaaacaacgcatctgtcacatcttcggcagtaaaatctgccgccatctgatggatggtttcaccatcttgagtcgctaatttgccaacttttaagagctcctcgtaggaaacattttccaacttcaaatcttttaatgttgttggtaggtttagagcctgatagaaggaaacaaacttgttgatcatttctcttggcttattttctaagaatagctgagtcagggttccgtaagcgactttttctccgtgagtcagggtatggatgtctccatgcagtgcggtaaagccgttatggatcgcgtgcgccgctgcaagtccgcagctttcaaagccaatcccgcttagaagtgtattagcttcgacaactgcctctaaagctggtgttaccacatttgcttcgcaggcttctatcgcttgaaaggcgttcgcgaacaaaacactttcacatttttcggtgatcacttcagctgctaaagttggagctgcgccacccatcgtttttccatgggcttcgataatcgatctcccttcgacccaagtcgaaagtgcatccgcaataccagaagctaacaggcggctcggcgctttggaaatcactgccgtatctaccaacaccaattcgggattcttcttatagaacaaatattgctcaaataccccttcctctgaatagataacagacaaagctgaagttggtgcatcggtagaggcaatcgtcggcacaacagcaacagggatagctaatttatcgctgattgcttttgctgcatcaattgtttttcctccgcctaagccaataaccaaatcgctttgattggttttgccaatgtcgcttacgcgttcaatttctttggttgaagcttccccgttaaatggaacacgggtaacagcgatattctctttttttaattgatcattgaacgtttctccaacaatttcccaaacgatgtcgtcgcaaagtaacaatgcattgactcctaacgctttgatatgcgcaatcccagtagtcagcacaccttttccttgtacatattttgacggacttgcaaatactttctccataacgaacctccaaattttttttaaagtgacgcgatagtcgttccttctccaaaacttgcttcccaatcagaggtgaaatccaccactgctttttcaattgacggcattgcaaaagcagatttaatgatgtctacacccatcgttgcagagtgcgcgccattttctaaagcggcgttcacttgaccgacatttttgaagctagcagcaagaattttggtctggctgttggttcttgaaatttccttcgccatttcagcaatggcttctctaggatcaatgtttaagttttccattcggttgaaataaggcgcaatgtaatccgcacctgctgcgatggctaaatacgcttggaatttggtgtagattgcggttgcagtcacattcacttcgcgtttctttaattctttaatgatttttatgccctcttcactgacaggaacttttacaaagacatttttgtcaattttcgctaaaatcgtttctgcatccttaagcattccctcataatctgtggcaacaacttggacatgaagggatttgtcgtctccgatgatttgtctgatttgtttcatatgagaaaagaattcgatgttgccttcattctttacgattgaaggatttgacgtcacacctgctaaaggaatgattttttcaaattttttaatgtctgcgatatttgctgtgtctaacataaattccatttttgcacactccgttttcaagtaattcggattatttgtggaaaaattcacaaatattcacttgcagttaaacctagaatatatctgagagactaggtctctcagatataaggaatctcttacaatacatgctcggtccgttcaataatgtcatcttgggttgcttttgataagacattgaagaaggcagaatagccggcaacgcggacaattaagtcacgatgtttttctggatgtctttgtgcatcgatcaatgtttctctagagacgacattgtattgaatgtggtatccgtgcaatttattaaagaaggcgcgaagcagcatgatcaatttttgcttgtcttcttctttggctaacgtttgaggattaaccttttgattgagtaagacgccaccaatgatttcctctgttcttagcttagagactgatttaagcacggaagtcggtccgtttttatccatgttatgggatggtgaacagccttcagctaaaggcacccacgcattacgtccgtctggtgtagccattgtgcctttcccttgaccgacatttgctgaaatcgatgaggttccagaataacgggttccgccgattggtccgcgtccaaaacgggtacttgggtattttttgacttcttcgatatagctgtcataagcttttgtcaccaactgatcggtataatcatcgtcgttcccatattttggaacatcgtttaggatcatttgctggatttcttgactgcgttcactggcataatctgtcatcaatgcttcccaaagctcttcttgcgttactttttgctcttcataaacgagcttcttaatcgctgctaaagaatccgctaagttggcaatcccaacctgaaggcctgaaatgaagtcgtaaacggctccgccttctttcaatgtcttccctcggccgatacagtcttccgttagtgcagaacacaaaacatctgggacttctcgttcaaggccaatatcaatagcattttctacaatgacactcatacgcgttaattcacgcacggttttatcccaagcatcctgcagctcttcaaaggacttcatctctttgaaatgaccataacctttaacaaaacgtttaccagaaaccgggtcaatcccgtcattcatcgcaatcattaagattttagggaagttcatgtagctcattccggtacagcgatagccccatttacctggaacagccgtttcgacacagccgattgcactataatcataggcatcttcttctgtgacaccaattttttcaaatgaagggatgatgatttcatcattgttaaaagcaggcatcccaaaacctagcttcattacctcaatacattcattcataaagtcgttatccaatcctgaatgataacgaaccgttaaattaggctgcggcaattttgtttgcgcaacacttcgaaggacaagataagataacttatttacggcatccttcttatcccgcgtttggccgccaatggtgacattttgatacaagggactgcctgcactgctaaaggtatgggcttggcttcttactttattaatagttaatgttttgatccaaaggttggttaacagctcaaccgccttcgcttcagtaatggtgcctttttctagatcagatttcaaatatggatacatatattgatcgaagcgaccgtaagaaagcgaatggccatttgattcaatttgtaaaatcaattgaataaaccaaactgattgtactgcttcttggaaggtttccgccggctgattgggaacttttgcacaaatacggctaatctctaacagctccgcttttctttccggtgtcgctgtttcggccagctgttttgctaaggcagagaaacgttctgcgtaggtttgaaccgcatctaatacgatcaaaattgcattgtaaaattggtatttatcaatgctttccggctctgtcagatctaggttcgctttttcatgcaatgtccgtttgcgatagccttccaagccaacttctaacacagtccgataatccacggctaagtgggcatcgccagaattcatctttccttccattccgaagaagcccgtttccataaatacagaaacttcatcaggcagtaagcagcccgcttttgctcgtaaattattgttttcccagaaaggcgcgatcgaacgtaaatcctctttggttttttcagttatatagaagacatcgccatcacgtttttcaaatagatcaagttcatttaaaacgaattccatcgtatattctgggaaaatcggtgcatccttgttggaggctgcttgatttccgacgatcaaggtttcatcttcaatgtaaatcgacattttttctagaatgttttttaacatcaatgcccgtttcatgacatttgtctgatgttgattttccttataggcttcagtagctaataatgcgcgttctgcacaaatatagggtttcttgttcagtacagattcccgatactcgttcatacgatttgttaaatgaccaaaatacggttgactgttcgtaccttcacgttcttttgtttgaatactcatatcaagccctcctgtttcgttcgtaactattttattgttctttcgaagttatgataccatgcactggtaaaatacgtcaatatgaatccagaacaaaaaaagaaaaaagagaattgcacaaatgtgcaattctctttaagggtaacccattacttcactgcgatgacatcaattttatttttgttcaggaaagtgcgtgttgcttcttcaatcccatcatcggtaaaaatcttgctgatctcattaaatccaaattcagataccacgccattttgagtaaatttgctggaatccgttaagacaatcgtgtgcttcgccgcggttgctaaggttctcgtcgtgtcgcatctcgtgatatcactgccagtaaagccccgcttcaaatcaaagccatcaatgccaacaaatagcttatcgacgtaaaattcgctaattacctgttttaccagcggccccacgttcacctgagattccttttgatactcgccgccgattaagatcaccttcaccgaatccgctttccttatataggaagcaataaagcatgaattcgtaatgatcgtaatgtcgtttcgattgaaggccaactcttctgccaacaacgcacaggtagaccccgattcgatcatgatcacatcgccatcattaacaattttactggcttctaaggcgatttttcgttttaaatcgtaattttgagccaatctatagttaatatcatccatattattcaataaggcaaacccatgttggcgatgcaaaaggcctcgtgattctaatttatccagatcttttctgatggttactttggatacgtttagcaattccgaaagttcatttacttcaatttttttcttttgacttactatcgaaataatttcctcttctcttgtcatagtgaacctcctttatccctcttagattaccatatttcctatcacgcaacaatattttaaaatcatttagtttcgtacgtaatatattatatttacgaatacaatattatttgttaaaatacaagtgagttaggaaaggagtcttaccatgaaagacaaagcctgtatctttaatatccaaaaatttagtattcatgacggtcctggtatccgaaccgtcgtatttttcaaaggctgcccattgaaatgctactggtgttcaaatccggagtctcaggacggtaaaccagaaaatatgtgggataaccaaaaaaaggctgtcactactgtaggtgaatacaaaaccttagacgaaatcattgaggaagtgatgaaggacgaaccattctatgaagaatccggcggcggcgtcaccttatctggcggcgaagtcctttatcaggcagagttcgctaccgaattacttagacaattaaaggagaaaggcgttcataccgctagtgagacgacgggattcgctcgagctgaagtctttaaaaaatatatcgagcaagtcgacattctctactttgatgtgaagcaccacgatgaagacgaacataaaagaggaacgggtgtgtcgttgaagcctatcttaaataatttaacctacgccctcaacgagcatcccaatttagtagtaagaattccggtcatcccgaactataatgacggagaggaaaatgccgaagcctttgctcagctctttaatcagatggggatcactacggtcgagctgctgccttttcatcagtttggagaaaaaaaatacgaataccttgagagagagtacacgatgcacgatatccctcagcttcataccgaagatttggattactttaaagcgatctttgaggaccatcagatttcctgttcggttcactaaaaaaggcgtgcgagcattatgacgaaaaatgcctttacttatgattatatcgctgttctaattttttcttatgggtagtcatgatttcatcaaaagaaatgttgtatttatccgcgataattaataagttatcaagaacgtctcccagctcctctgtcaaattttcaagagattcttgatagtcagcttgttgttcatcgggacgatcacggccgatttcaatagctcgaattgcgcggcagacttccccgacttcttcggataaaaaattagagcgaataaatggattatattgataccaatttctttttttataaaattcactgatccatgtttgatactttcttaattccaatctataacctccttttttaggaacataagttcttttttctatggtacactaaactaactatgaaagaaagaggggaaatatttgaatatcatcgtttattgtggagctaatacggggaaagacccaatctttcagaaaaccgctgagaacttagggggatggatcgctgatcaaggtcattcgttagtatatggtggtggaaaagctggattgatgggagttgttgctgatgcggtgcttgataaaaatgggactgcgatcggtgtaatgcccacatttttaatggaaagagaattggctcaccctaagttgaccaaaatgtataccgttgcaaatatggctgaaagaaagcaaaaaatgttcactctaggagatgcctgcatagctttaccaggcgggccaggaacattggaagaaattacagaaatgatttcgtggtcaaggattggtcaaaatccaaatccatgtattatgttcaatgaaagtggattttataatccattgaagaatctatttgataatatggtggaaaacgaatttcttactgaagcagacagagccaagacgctattttctgtttcattaaaggaaatcgatcaatttataaaaaattacacacctccagaaatcagaacatattaactttaatcaatgaaacacaagctgattgtgcctcgttgattaaaatccctcagtcttctatgactctaagagattatacaaatttcataaatcaccttttgttttgtaccatctaaatgtaatacaatagtttttctatcgtgaaattacattgactgaagccaaatcatcttaatctgataaattaacccctaacgaggacaaggaaataattacgtcctagttaggggtgtttattatggggaaaatgaagaatcaactggattaggagatataatcctcgcggaagctgaaacgacacaaagcggtagctactacttgaaaaaaactactctccaaagatggaagagtagttcaaaaaaaaatatttcattgtcctattgacgggcagcccgccattttttgatcacatgcatttttgttaatttgctatttcaacttcggcttctgccgcttcttttttggttacgccaagaataacgacacccacagctacccctaatacaaccgaaaggacaaacccaaaaggattcgcattcagcggtaaaatgaagaatccgccaaacggcgccatgactgaatacccgagtaaaacagagccaccgccagcaattgctgagccaatcatacacgcagcgccaactctaagcggatctttcaataggaaaggaatgccgccttctgagatgccggctagtcccataatcaagttggtgattccttgtccccgttctttctccgtaaatttttttctaaacaataaggaagaaattcctgtgacatacggcggaatcaaggcaccagctaataccgcagacatcaaaacatattgtccatttgccaaggcagccgtagcaaacagatacgccgttttattgatcggaccacccatatccgcagactgcattaaacctaaaacagcgcctaaaataatctgacttgacccattcatagactgtagccctgaattcattaacaggttcaacgtgccaataatcggctccaccaaaaattgtgcgattattgctgtaacaatcaccgaaataagcgggatgagcagtaagtctttcaaaattgtaaacgtctctggcagcttcgccaatagctttttaagcaatagaacaaacaagccaacaacgaaacctaataacagcgcccccaagaaacttgaatcgccatcacgacagattgccccggccattagtgccgcaggaatccccgcgactccagcaatataaaaggcaatcccggcacaaaagaccggtaacatgaagctgaacatgacattcccgttattattgaagaatgccgctaaaggcaagttggttccataagtatcaggattgatggaaatatcatctaataaaaaactaacacctaacataatcccgccagctactacgcacggcagcatatagttgactcctgataaaatcgattctaaaaaatgattctttttcttttcaactgtctccatctttctctccttcgctaccttacacagccttctgctctgactggatcaactccgtactgcaatttggacacaagatcgcattatgctccgcgtactcatcggctttctcgatatattcctcgaagaagtgatacagcgcgccataaagattggcgtcattatttagcgtcgaattttcaataacaggcatcagtaagtacatcggatttttcttataaatctgctctacttccttcatgatctgttcacacacaagtgactgagtactgatcccgccgcagataatgaaacgttcaggatcgagaatgtattgtagactgacgatcattttagcaattttatggcagtattccgtaaagattgaccacgatgctgcgttttcctttttgatatattcaaagacgatgcggccatcggtatcaggagacaaaccatttgcctcagcaatatcattgatcattttaggcgcacaggcatcaaaaccgcacattttaaaaatccctggctggtctgtcgggtcccctaccatatagctcacctcaccagcggaaaaatgctgtccacgatggagcttaccatcgatcacgatgccgccgccgattgcactgcctaaaaccagaatcacggcatgtttggactgattgactcccccgcgccataattcagcaagtgccgccgctttgccgtcgttttcgatcgaaacaggaagcttaaatttttcaatgaatttctgtttgagatttacttcatgtaaataggttaaaaagccgccgtagtagacgactccttgataagagtcgactacccccgggcagcaaatggaaatgcctttgacctcgtattcttcataacgctcaatcgttgaaaacatttcaagtaataattcatccaatgactgctgcggcgttggaaattttccttgaatgaagatatttccagacctatctaaaattgcatattttacaaatgttccaccaatatcaaataccatgtacattttaaagtcactccttgctttacgctaaatcaacaatcgccgcttgactggaagaaaccgaatctccggaaacaattttgatctctttattcgctagattggtaaaggcaacaatcgtcatggtatttttcccttgctctttcaaatagtcaaagtcaacaatgaacaagcgttggcctttatgaatttggtctccttcattgaccatcacttggaagccttcgcctttaagcgcgaccgtatccagaccaacatgcacgatcaattcaatgccgcaatccgttactaagcctaccgcgtgttccgttgggaagacattgataaccgttccatcaatcggtgatacaatcacattatcttctggaataacggcaaatccatcacccatcattttttgtgaaaagactggatctggtacttcactcatgggaacgatttttccggctactggtgaaacaactttttctttaatattcgcacaggcgtcatccagcttgatttctaacggagcttccactgtgatcgttttctccaaatcaatttcagcaggacgttccatattcgaatcgatgatttcattgatagttgtcgcataaatatctgattttgcgccgaaaatcgcttggaagccatcgccaacgtgcacgacacccactgcgcctaattttttcaacatctcttcatccacaatcgagttatccaccaatacggttcttaaccgtgtgatacaggcttccaccgatttaagattggctttgccgcctaatgcatcaatgattttccagctaaccacaagattgccgccagatgaaacagccgcggcctcttcgtcgtcaacattttcctcacgaccaggggttggcaaattcagcttgacgatcacaaatctgaagacaaagtaataaataaccgcaaagactaaaccaaccggaatcaccaaccaccaagaggtacgattgactaaaacaccaaaaagaatgaaatcaattaacccgccagataaggtcatcccgatttttacccctaaaatattcatcaccgcaaattaaactccggctaataaacaatgaataccgtacaaagcaggcgcgatgaataggaaagaaaactctaatggttccataatccctgttaagaaggcggttaaggctcctgatagtaaaatcccactggctaacacttttctttctggttttgcttccttatacatggcataggcagcagctggcaagccaaacatcatgaatgggaatttccctgtcatgaaggctcccgcggttagcgcaaccccgtcacgcatttgttggaagaaaatttgctgatcgccgtggataatagctcctgaagtcgacgtataagaaccaaattggaaccagaagggcgcgtaaaatacgtgatgaagaccaaagggaatcaatgcccgctcgattactccaaaaataaagacagccaacgtttgattcgtttcaataacggtcgaagaaaaaccattcaagccatcctgaatcggcggccaaatgaagcataaaactcccgcaatcagcagtgagaataccgccgttaccattgggacaaatcgttttccagaaaagaagcctagataaggcggtaattcgatcttatagaacttattaaaacaattggatgcaatcaccccggcgatgatcccgccaaagacacccgtttgcaacgtaggaatccctaatacagtggcgtatttctgaccattttcagccaccatttctggtgtaattcctaaaatagcccccatcgccatgttcatcatcaagtaaccaacaaccccagcaagggccgcacttccatcatttttagctaatccaatggagaccgcaattgcaaatagcaacggcagattgccgaaaataatcgaaccagattgctccattacatctgccacaatctgaaaccagccggcctgcaacactggaaattggttcaaaaccgtttcctgatggaacaaatttccaaacgcgagtaaaatcccagcagccggcaaagtagcaacaggcagcattaacgacttaccgaccttttgtagaatcccaaataattttttcataaatcactcatccctttccattctctaacgtaactcctgattcaccatgacacgtgaaaacaactgatccactagcgtaaaagcatcctttctccaaacaagcagaaacagatttactgctaagggaattccaagaaaaacaacgttcaacaataattgcaataaaaacctcagcaacaagacgataccatcacatttagtgctactattcacaaatacataagcaagatgattaaccttcattccgatggtctgtctattgaaaaataaaggaattaatacataattgattatccctccaactaatagaccaacaagtaatgaaagctgcatccccagtccgatttgatggcatccataaagaacaacccttgcaaatacggagaaaataaacaggtcagtaatagtagcaaaaacctttttactctttagctttcttttcatacgtcactcctcctttttctttcgaaagtatttactgtcctttcgtaagtaaaaagttatcacctgaaagcgatttcgtcaacgacgcttgtgaaatagattctaaattgcacttttgtgcttttcttaaacatttttattttgaaatagaaatgcacttttgtgccaattagtagatgaatggtcttaatgtagtttttttggtagtagttgaagctgatttaactatccatcggttatcttctcttcgataatttggtgttttctctctcataatgcgataaatttctaatgtaccaaacatattttgaacacaaaaaaacgcctaatcatcgatatagatgattgggcgtatatatcacatcagttacaactacaaatcctctgtcttaaactctgtatatccttcataataataactagcatcaatccctttaaaataggtttcatgatcagcaatcttgtcggtcaaggcaggtctcaatagctctttaataggaagatcattcaccggactcatgatcattgctgaaaggtattgatccttgtctacctcgttccagtctaccatcttttctatttctttcttcagtatctggtctaaccaaattctagtggcacgaccgttgccttctctaaaggggtgagcaatgttcatctctacatatttttcaataatttgctcgtaattcgtctgttcgagcttctctatttctttcagtgcgggttcaagatacagcactggcgcaaatctaaactgaccttttgctaaatcaacctctcgggtttttcccgcgaaaggataaatatcttgaaacagataatgatgaatttgagccagtcctttaaaggtgcctacatcaaacgaatcaatgacattcttttctacgagttcttttgctctggttttacttactttttctttggctttggcaagctctgtttgattgtctatgccaagtaagttctctaaaatagccatgacctgttctcctcttccaaaaagacatcataatgatttttactaaacatctgtctcgtattggtttttctttctatataaaattagcattttctctagacactaaaatgaaatttgcacccattgcgtgattgagtgttgcatggtaaaattgatataaaggagtggtactatgcttattgcaaaatctagattacaaggaagctctgtagtgataaccttaccttcggataacgggaagaaacctaaagaaaacaaagagtatattgttgtctattctgatgatgggacaatcacattagttcccaaaatcgaagatcccttcagtggtggagaagaagcggagtattatgaaaaagacgaatggacagatttatctcctgaaggaagagagattttataatgactgaagaaaaaatctatgttcctaaaaaaggagatattgtgtggattgattttgatccttccgcaggaaaagagattcaaaagagacgtcctgggttggtcgtatctagatacgagtttaaccgtaaaacgctgtttgcagtgatttgcccgattacttctacaataagaaacttaccaacacgttattctttaccaaacgatttagacactacgggacaaatacttatttctcaattaaaatcacttgatttcaaagagagaaagctcaaaaaaattgaatccttacctttgcaagatatggctaaaatagatcaaattattgaatatatattttaatcatagtaaggagctgttgttattagtacaacgagtttgttactatgattttttctcatatgtcttgcgagagtcacgttatataaattcggaaacaaaaatcactcatatcaaaaattgtccaattcgatgccatgtagtttttttaacaaccaatttccttttcccatataatgaacccaccaaaacggcatctatcccctaacaaacggcatactcatacaacgtggaccgccgcgtccgcgaacgagttcacttcctgggatggtgtttattttgacgccggcttcttttaatttcttattcgtgatcgtgttccggtcgtagacgatcacttcgccgggtgcgatcgctagggtgttcgcgccatcgttccattgctcgcgagcagctgcggtgatatcatttccgccgcaacgaatcagctctacagccggcaaatcgagatagcggcacagaatattttctaacgtatccttttcttcaataatttttactttttgattggctttgattagtgaatagaccgccaaatctccttcgatctcaggatggatcgtaaatttatcctgatccaccatcgtaaagacggtatctaggtgcatgaattttcgttcttcgccaatattgaaggccaatacctgctcaaagcttggctctgattcaaaaatgcgggcggctaattttttgatggattccatatcagttctttgggagattccgacagccaatactttgcttgaaagcaccaatacatcgccgccttcaagtctcgtactgtcttcacggtcgtacagcagattcacaggattctgcgcaaacatgggatgatggttgaagatatacttggcataaaacgtctctctgcgacgggtttcggcatacattttgttcagtgcgatactgcttccaatcgttgagaagggatcacgagtaaaatacaaattcggcattggatcaatataaaaaggtgacgcctcatccgtcctgtcaaacagctgatttcttttcaaccctgccatcgtatgatcaataaacatgcggttatccttaatagctgaaaaatagtccgtaatttctttgcggatatcaccgtcagtgatgaaggcttcatctaagtattcctgtaaaaattcctgcttaatcccatcacatgttaaggactccgcagctaaatcttctaagtagagcacatcaacaccttttgatcgaagggtatccgcaaatagatcatgctcccttctcgcctgatcaagaaatgggatgtcgtcaaacaacaactgctccaaataatcgggcatcaagttatctagctcctgtccaggccgatgcagaagcacttgtttcaatggaccgatttccgaaaaaacatggattggtttcttcataaattcttccccttcctctcgacatgtacacgctttcgattataggcatgatattcgttactcaaaaaaagaatgcctaataaaagtatagatgagaatcacagataatccaagttccctgctgttgcaaaaaagaaaagagcctcgaaagactctttagtacaaagtatccaattatctgaaaaggtcagaatgactgcctgtgcgttcaaaaataattgtcttctttgcgaacacataataaaaaataacaatccaatcactattccgtccaccaatatgtatatcccatcgctttggaatctgattcttgggttctaatggatgaagcttgtactcttgacccagctccgcttcatttatcagtaactccatcgcctgttgcaatttttctatctatcgcccttgtttaatcaatttttttcacatctttatcgaaacgttttgttgtctgataattaagcatccaaatcggcttcctttttcattctatcaaagtaggcctgcaattcttcgttattccctaaatttccttgattaatcatttcatcggtctctttgaaggcttttaatgtttcctcgttgggctggtgatcgattgtttctatttcaaatggaaatttcccagttttaacaaatcgtgtcaaaaaaattttcaccgcaactgaagtattcattcccacctcgtcgaacatttcgtcggcttcttttttcaactcatcatcaatgcgaatggttgccattttgctccctcctcttattattaactatctatattataatgctttcgtatataaaaagctacatatagcaacaaaatgacgatagatagccccgtttatcaccatcgaaaattcaacactccaaactactgaaggatataccctttcccccagtaggtcttgattcttttgtctgtatagttgtatgccgcgagtttcttattgaccttcttcgctatgtacgagagctgagattttctcgattttgattcgtccccttgccaaatgatctgacataattgttggcgagtgatcggtcgctcctcctgtagttgttcaaaaaataactgttcattcttgctcaactttcgaataaattgttctaatgttgcctgttctttgtattcatcatttttagtaatgagcgtggctaaaagatctcgcaaatcgacaaatgaccgactaacgtataatacgtttgaagcttcttttgagtgtgaagggtattctccgttttcaggaatcacacgaattatttgcccgttaaataaggaaaaagctttcttggttattgataaaaattctttctctgataacgtttcactcaaaaataaacaatcaaatacaagctcacattcatttactaaacaaatgctccgttcatttcgtgtcacgaaaacttcgtgattcaaaatctgcaactctcgttgtaatactaattcatgatggatgttcttggttaacaccaatattctcatataaaattcctccagttgttctatctgaaataagttcactgtccttcgaaacttcctataaacaacaatattattagcacttaatttattttgcgtttcaaacgattaactaaaacgccaaggatcatcatcacggatatcgcaataccaccgaaccatgtaacgtagtgctggctcttttcaccgttacttggaagagtcttcgatgaagtaatggttgaatcacttgattctactgacgatagtgtgcttgattccctcgactccgcagttgaagttactgaagcgattttcttatatgttactgtttcttctacgtcttcatcgtcaacttcgagattagtcacttcatcgattacctttttatctgctgtatacccattgaatttcggactcttcaccttctcaaaggtggtatcctggtctgcggccacccattctccataaacagcttcaccggtcattaggttttccgttacgatacgtgtgaaagtgactgtttccgttttgtctgacgtggctttcttggcgctttcgtaggtataatgaatcacccgattgatttctttagtttcgatccgttcttctgtttttgttggagtaacaatcgtttccgcggaaacagggaggctcaccagcgcttgtgtaacaaaggagcctgttaacacaaaaaaggtggaaaagacaaataacaatcctttttgcttggttgatttcttcattaatatttgtcttctttctataaattgaacgaaataaataacctcgctaacgaaaaaagccatcaaatgacagcacgctcaagctattcggtttcgttcttttttccttacgaaaggtatcataatctatagaaacgttaacaaagcgtcatcatttgtgattatcagtaactatttcggtttattttgttaaaaacaatcatttaaaggcaatgttgtgtaaaaatgattgaagaccaatacacatatttcaaataaaatccaataataaaattctatttttaactatcagtagctggaaatcactgacataaaccttagtaattcaactgttcctatctaaaatgccagtttctagttgtttttttatcctatttgtcgttttacagagtagcctttcttttttgaacccaaagcaaataagaaaacctcaggagaaaaccgctcctgaggactttttgtttagataaatcattttattgtcgatcactgattctaaattcgtgtccaagtatgttcttatagtattctggatacatctctccaccacatttttcgcaatcaaattgcggagcgttctcaggatcaaatgcaacatctcctgcatccaaaaattgaactacttcctttggaattttttcctttatcccacattcaagacaaatgtaatgaaccactccattggaatcgaagttttttaaaagctgcttctttttctttttcatacttacgtttcgatgcttcttccccaatttttttattctcctctcgcatgaatcgttccgattctttattcttcgcatatttcactacaagtcgtccatttttagacacactaactccactaaattcataatattcgccacatctagtacattccaatggatttactccgaattcttcggctattcgttcacaccatgattttggtttaagtgctttcttcacattcacaagcattcgttgaatctctttctggtaattacttaatacttttttcatgattgtcttgatccgccgactataaatgccgtatctacgaattgttttgaactggttctctggaatatgacgaatcagtgcaccaataaattcctctgccgacatcgtctttatcttatccgtgttagttcgtttatcatgatactgaaacatcactattttcccatcgtacaaaaggatacgatttaaagcaatgggaccacgtttcatataacgactgatatattctaatatctttttgagagaagttcggctccttttgggtgcatgcacgtaaaaaccctctgcatttttcgtgtacgccgcttgtaaaagcggctggactcgtgccttatcccattgggataaggttcttcgaatgagctttaggaccgcattctgccaatatttcctcaacattgcgaacggaaaatagtcatagtccttccattttccatccttcgtcagtccacccatggtgacgactaaatgaacatgcggattgtattctagctgagaaccgaaggtgtggagtgttgccacaaccccagcttgtatatggtgctttctaaaaaaatctaatagtatccgtgcagcttcatccattaatccttttaaaagctccttacgatacttctccttcagaaaaatctcacgtaaaccttcatcgatcgtgaagatgacgtgtcgatgcgtcactgtaaacagatcattcgccgcaacctctgcccaccgttgactttccccagttgcacaagttggacaaaatttccctttacaacgaaaagccactttctttacatcatggcatccttcacagacaaatagacgataaccttttttaaggtcaccacaatcgcgaaacttcttcacttctcttttcacaacggatcgaatccttcttgtgtacctttgattgaatttctcccagttttgatattcatcaaagaaaatggcgtgtaaaatattgggtttcatatctccagtttaataggaaaaagaccagatgaaaagcggtcaaaagattgatgtatcaatcctttgacctcttaaaatgttatacttcctttaatgtcaaaaaa
